(19) United States
(12) Patent Application Publication
(10) Pub. No.: US 2006/0121580 A1
(43) Pub. Date: Jun. 8, 2006

(54) Binding molecules against SARS-coronavirus and uses thereof

(75) Inventors: Jan Henrik Ter Meulen, Amsterdam (NL); Cornelis Adriaan De Kruif, De Bilt (NL); Edward Norbert Van Den Brink, Halfweg (NL); Jaap Goudsmit, Amsterdam (NL)

Correspondence Address: TRASK BRITT, P.O. BOX 2550, SALT LAKE CITY, UT, 84110, US

(73) Assignee: Crucell

(21) Appl. No.: 11/337,300

(22) Filed: Jan. 20, 2006

Related U.S. Application Data
(63) Continuation of application No. PCT/EP04/51568, filed on Jul. 21, 2004.

(30) Foreign Application Priority Data
Apr. 29, 2004 (WO) PCT/EP04/50643
Apr. 14, 2004 (WO) PCT/EP04/50516
Apr. 7, 2004 (WO) PCT/EP04/50464
Mar. 19, 2004 (WO) PCT/EP04/50334
Feb. 13, 2004 (WO) PCT/EP04/50127
Feb. 2, 2004 (WO) PCT/EP04/50067
Dec. 4, 2003 (WO) PCT/EP03/50943
Nov. 24, 2003 (WO) PCT/EP03/50883
Oct. 16, 2003 (WO) PCT/EP03/50723
Sep. 1, 2003 (WO) PCT/EP03/50391
Jul. 22, 2003 (WO) PCT/EP03/50328

(51) Int. Cl. C12Q 1/68; C12P 19/34

(52) U.S. Cl. 435/91.1; 435/6

(57) ABSTRACT

The present invention provides binding molecules that specifically bind to SARS-CoV, nucleic acid molecules encoding the binding molecules, compositions comprising the binding molecules and methods of identifying or producing the binding molecules. The binding molecules are capable of specifically binding to SARS-CoV and can be used in the diagnosis, prophylaxis and/or treatment of a condition resulting from SAR

### CROSS-REFERENCE TO RELATED APPLICATIONS

[0001] This application is a continuation of PCT International Patent Application No. PCT/EP2004/051568, filed on Jul. 21, 2004, designating the United States of America, and published, in English, as PCT International Publication No. WO 2005/012360 A2 on Feb. 10, 2005, which application claims priority to International Patent Application No. PCT/EP04/050643 filed Apr. 29, 2004, which claims priority to International Patent Application No. PCT/EP04/050516 filed Apr. 14, 2004, which claims priority to International Patent Application No. PCT/EP04/050464 filed Apr. 7, 2004, which claims priority to International Patent Application No. PCT/EP04/050334 filed Mar. 19, 2004, which claims priority to International Patent Application No. PCT/EP04/050127 filed Feb. 13, 2004, which claims priority to International Patent Application No. PCT/EP04/050067 filed Feb. 2, 2004, which claims priority to International Patent Application No. PCT/EP03/50943 filed Dec. 4, 2003, which claims priority to International Patent Application No. PCT/EP03/50883 filed Nov. 24, 2003, which claims priority to International Patent Application No. PCT/EP03/50723 filed Oct. 16, 2003, which claims priority to International Patent Application No. PCT/EP03/50391 filed Sep. 1, 2003, which, in turn, claims priority to International Patent Application No. PCT/EP03/50328 filed Jul. 22, 2003, the contents of the entirety of each of which are incorporated by this reference.

### STATEMENT ACCORDING TO 37 C.F.R. § 1.52(e)(5)—SEQUENCE LISTING SUBMITTED ON COMPACT DISC

[0002] Pursuant to 37 C.F.R. § 1.52(e)(1)(ii), a compact disc containing an electronic version of the Sequence Listing has been submitted concomitant with this application, the contents of which are hereby incorporated by reference. A second compact disc is submitted and is an identical copy of the first compact disc. The discs are labeled “copy 1” and “copy 2,” respectively, and each disc contains one file entitled “2578-7586US seq listing.txt” which is 811 KB and created on Jan. 20, 2006.

### FIELD OF THE INVENTION

[0003] In general, various embodiments of thew present invention relate to biotechnology. More particularly, embodiments of the invention relate to medicine. In particular, the invention relates to binding molecules capable of specifically binding to SARS-coronavirus (SARS-CoV). The binding molecules are useful in the diagnosis of SARS CoV and the prophylaxis and/or treatment of a condition resulting from SARS-CoV.

### BACKGROUND OF THE INVENTION

[0004] Recently a new and in several cases deadly clinical syndrome was observed in the human population, now called severe acute respiratory syndrome (SARS) (Holmes, 2003). The syndrome is caused by a novel coronavirus (Ksiazek et al., 2003), referred to as the SARS-CoV. The genome sequence of SARS-CoV has been determined (Rota et al., 2003; Marra et al., 2003). However, much remains to be learnt about this virus, and means and methods for diagnostics, prophylaxis and/or treatment of the virus and the syndrome are needed. The present invention provides means and methods for use in diagnostics, prevention and/or treatment of SARS-CoV.

### DESCRIPTION OF THE FIGURES

[0005] FIG. 1 shows results from an ELISA, wherein the binding of the single-chain phage antibodies called SC03-001, SC03-002, SC03-003, SC03-005, SC03-006, SC03-007, SC03-008, SC03-009, SC03-0010, SC03-012, SC03-013, SC03-014 and SC03-015 to an immobilized SARS-CoV preparation (left column) or immobilized FBS (right column) was measured. The binding of the control single-chain phage antibody called SC02-006 is also shown. On the y-axis the absorbance (OD) at 492 nm is shown.

[0006] FIG. 2 shows results from an ELISA, wherein the binding of the single-chain phage antibodies called SC03-016, SC03-017 and SC03-018 to an immobilized SARS-CoV preparation (left column) or immobilized FBS (right column) was measured. The binding of the control single-chain phage antibody called SC02-300 is also shown. On the y-axis the absorbance (OD) at 492 nm is shown.

[0007] FIG. 3 shows the construction of the bivalent scFv expression vector pPICZbiFVH. In FIG. 3A the vector pPICZaB is shown and in FIG. 3B the bivalent scFv expression vector pPicZbiFVH is shown. FIG. 3C shows the cloning strategy of scFvs into pPicZbiFVH.

[0008] FIG. 4 shows a competition ELISA of the SARS-CoV specific single-chain phage antibodies called SC03-001, SC03-002, SC03-003, SC03-004, SC03-005, SC03-006, SC03-007, SC03-008, SC03-009, SC03-010, SC03-012, SC03-013, SC03-014, SC03-015, SC03-016, SC03-017 and SC03-018 and the human monoclonal anti-SARS-CoV antibodies called (from left to right for each single chain antibody) 03-001, 03-002, 03-009, 03-013, 03-014 and 03-018. The antibody called 02-361 is a control antibody (second column from the right side). On the X-axis the single-chain phage antibodies that were tested are shown and on the Y-axis the residual binding (in %) of the single-chain phage antibodies to the SARS-CoV preparation in the presence of human monoclonal anti-SARS-CoV antibodies is shown. The binding value in the absence of human monoclonal anti-SARS-CoV antibody is set at 100%. This value can be found at the right side of each single-chain phage antibody (no IgG).

[0009] FIG. 5 shows the binding of the human monoclonal anti-SARS-CoV antibodies called 03-001, 03-002, 03-009, 03-013, 03-014, 03-018 and the control antibody called 02-027 (a human monoclonal anti-EPCAM antibody) to an UV- or gamma-irradiated SARS-CoV preparation. From each antibody 1 and 5 μg/ml was tested. On the X-axis the antibodies and on the Y-axis the absorbance (OD) at 492 nm is shown. For each anti-SARS-CoV antibody is shown from left to right the binding of 5 μg/ml of the antibody to the gamma-irradiated preparation, the binding of 5 μg/ml of the antibody to the UV-irradiated preparation, the binding of 1 μg/ml of the antibody to the gamma-irradiated preparation and the binding of 1 μg/ml of the antibody to the UV-irradiated preparation. The binding of the control antibody to the UV- and gamma-irradiated SARS-CoV preparation was only tested at a concentration of 5 μg/ml.

[0010] FIGS. 6A-D show sandwich ELISAs of the immobilized recombinant human monoclonal anti-SARS-CoV antibodies called 03-001, 03-002, 03-009, 03-013, 03-014, 03-018 and the control antibody 02-300 (an antibody directed against CD46) with from left to right a SARS-CoV preparation, a denatured SARS-CoV preparation and BSA. On the Y-axis the absorbance (OD) at 492 nm is shown. In FIG. 6A detection was performed with a polyclonal rabbit antiserum recognizing the complete SARS-CoV. In FIG. 6B detection was performed with a polyclonal rabbit antiserum (IMG-542) recognizing the spike protein of SARS-CoV. In FIG. 6C detection was performed with a polyclonal rabbit antiserum (IMG-543) recognizing the nucleocapsid (N) protein of SARS-CoV and in FIG. 6D detection was performed with another polyclonal rabbit antiserum (IMG-557) recognizing the spike protein of SARS-CoV.

[0011] FIG. 7 shows the vector pDV-C05.

[0012] FIG. 8 shows the ELISA binding of SC03-009, SC03-014 and the control SC02-006 to a SARS-CoV preparation, the S565 fragment (amino acids 1-565 of the S protein of SARS-CoV), the nucleocapsid protein of SARS-CoV and a control protein. On the Y-axis the absorbance (OD) at 492 nm is shown.

[0013] FIG. 9 shows the ELISA binding of antibodies 03-001, 03-002, 03-006, 03-009, 03-013, 03-014, 03-015, 03-018 and the control antibody 02-027 (anti-EPCAM) to the nucleocapsid protein of SARS-CoV and a control protein. On the Y-axis the absorbance (OD) at 492 nm is shown.

[0014] FIG. 10 shows the ELISA binding of dilutions of antibodies 03-009, 03-018 and the control antibody 02-027 to the nucleocapsid protein of SARS-CoV. On the Y-axis the absorbance (OD) at 492 nm is shown and on the X-axis the amount of antibody in M.

[0015] FIG. 11 shows a competition ELISA for binding to the nucleocapsid protein of SARS-CoV between biotinylated antibody 03-009 without competing antibody or with 25 or 50 μg/ml competing antibody 03-009 or 03-018. On the Y-axis the % of maximal binding is shown and on the X-axis the amount of the competing antibody in μg/ml.

[0016] FIG. 12 shows FACS binding of the antibodies 03-001, 03-002, 03-006, 03-009, 03-013, 03-014, 03-015, 03-018 and the control antibody 02-027 (anti-EPCAM) to the full length S protein expressed on HEK293T cells (left column) and ELISA binding of these antibodies to the S565 fragment (amino acids 1-565 of the S protein of SARS-CoV; middle column) and S318-510 fragment (amino acids 318-510 of the S protein of SARS-CoV; right column). On the right Y-axis the absorbance (OD) at 492 nm is shown and on the left Y-axis the mean fluorescence intensity is shown.

[0017] FIG. 13 shows the ELISA binding of dilutions of antibodies 03-006, 03-013, 03-014 and the control antibody 02-027 to the S565 fragment of the S protein of SARS-CoV. On the Y-axis the absorbance (OD) at 492 nm is shown and on the X-axis the amount of antibody in M.

[0018] FIG. 14 shows a competition ELISA for binding the S565 fragment of the S protein of SARS-CoV between biotinylated antibody 03-014 without competing antibody or with 25 or 50 μg/ml competing antibody 03-006 or 03-014. On the Y-axis the % of maximal binding is shown and on the X-axis the amount of the competing antibody in μg/ml is indicated.

[0019] FIG. 15 shows the flow cytometric analysis of the binding of the S565 fragment of the S protein of SARS-CoV to Vero cells in the presence or absence of antibody 03-014. The dotted line indicates Vero cells incubated with a myc-tagged control protein, i.e., bivalent scFv 02-006. The normal line and bold line indicate Vero cells incubated with a myc-tagged S565 fragment in the absence or presence of antibody 03-014, respectively.

[0020] FIG. 16 shows the flow cytometric analysis of the binding of the S565 fragment of the S protein of SARS-CoV to Vero cells in the presence or absence of antibody 03-018. The dotted line indicates Vero cells incubated with a myc-tagged control protein, i.e., bivalent scFv 02-006. The normal line and bold line indicate Vero cells incubated with a myc-tagged S565 fragment in the absence or presence of antibody 03-018, respectively.

[0021] FIG. 17 shows the flow cytometric analysis of the binding of the S565 fragment of the S protein of SARS-CoV to Vero cells in the presence or absence of the control anti-EPCAM antibody 02-027. The dotted line indicates Vero cells incubated with a myc-tagged control protein, i.e., bivalent scFv 02-006. The normal line and bold line indicate Vero cells incubated with a myc-tagged S565 fragment in the absence or presence of antibody 02-027, respectively.

[0022] FIG. 18 shows SARS-CoV secretion at days 2, 4 and 7 of ferrets inoculated with a virus-control antibody mixture or a virus-03-014 antibody mixture.

[0023] FIG. 19 shows SARS-CoV lung titers at days 4 and 7 of ferrets inoculated with a virus-control antibody mixture or a virus-03-014 antibody mixture. The dashed line represents the detection limit of the assay.

[0024] FIG. 20 shows the lung pathology score at days 4 and 7 of ferrets inoculated with a virus-control antibody mixture or a virus-03-014 antibody mixture.

[0025] FIG. 21 shows SARS-CoV titration in lung homogenates on day 4 after challenge. SARS-CoV lung titers of ferrets administered with control antibody (named control) or with antibody 03-014 (named CR3014) are shown.

[0026] FIG. 22 shows SARS-CoV excretion measured by RT/PCR in nasopharyngeal swabs on days 2 and 4, expressed as SARS-CoV genome equivalents. In the 03-014-treated group (named CR3014) three animals had no SARS-CoV excretion and are superimposed.

[0027] FIG. 23 shows electron micrographs of SARS-CoV incubated with the monoclonal anti-SARS-CoV 03-014 IgG1 antibody (see section a) or a human monoclonal control IgG1 antibody (see section b). The bar is 100 nm.

[0028] FIG. 24 shows electron micrographs of ultra-thin sections of Vero cells infected with SARS-CoV. FIG. 24A: unstained (control) sections; FIG. 24B: sections stained with the human monoclonal control IgG1 antibody 02-027 (anti-Epcam antibody); FIG. 24C: sections stained with the monoclonal anti-SARS-CoV IgG1 antibody 03-009; and FIG. 24D: sections stained with the monoclonal anti-SARS-CoV IgG1 antibody 03-018.

[0029] FIG. 25 shows binding of the monoclonal anti-SARS-CoV IgG1 antibody 03-014 and a control monoclonal anti-His6 antibody to the amino acid region of 318-510 of the S protein of the SARS-CoV strain Frankfurt 1 (called WT S318-510) and variant S318-510 fragments (variant A, mutation K344R; variant B, mutation S353F; variant C, mutation R426G and N437D; variant D, mutation Y436H; variant E, mutation Y442S; variant F, mutation N479S; variant G, mutation K344R, F360S, L472P, D480G, and T487S; variant H, mutation K344R, F501Y). The control is an irrelevant myc-His tagged protein. On the Y-axis is depicted the binding as percentage of binding to WT 318-510, which was set at 100% for both antibodies.

### DESCRIPTION OF THE INVENTION

[0030] Herebelow follow definitions of terms as used in the invention

Definitions

[0031] Amino acid sequence. The term “amino acid sequence” as used herein refers to naturally occurring or synthetic molecules and to a peptide, oligopeptide, polypeptide or protein sequence.

[0032] Binding molecule. As used herein the term “binding molecule” refers to an intact immunoglobulin including monoclonal antibodies, such as chimeric, humanized or human monoclonal antibodies, or to an antigen-binding and/or variable domain comprising fragment of an immunoglobulin that competes with the intact immunoglobulin for specific binding to the binding partner of the immunoglobulin, e.g., the SARS-CoV. Regardless of structure, the antigen-binding fragment binds with the same antigen that is recognized by the intact immunoglobulin. An antigen-binding fragment can comprise a peptide or polypeptide comprising an amino acid sequence of at least two contiguous amino acid residues, at least five contiguous amino acid residues, at least ten contiguous amino acid residues, at least 15 contiguous amino acid residues, at least 20 contiguous amino acid residues, at least 25 contiguous amino acid residues, at least 30 contiguous amino acid residues, at least 35 contiguous amino acid residues, at least 40 contiguous amino acid residues, at least 50 contiguous amino acid residues, at least 60 contiguous amino residues, at least 70 contiguous amino acid residues, at least contiguous 80 amino acid residues, at least contiguous 90 amino acid residues, at least contiguous 100 amino acid residues, at least contiguous 125 amino acid residues, at least 150 contiguous amino acid residues, at least contiguous 175 amino acid residues, at least 200 contiguous amino acid residues, or at least contiguous 250 amino acid residues of the amino acid sequence of the binding molecule.

[0033] The term “binding molecule,” as used herein includes all immunoglobulin classes and subclasses known in the art. Depending on the amino acid sequence of the constant domain of their heavy chains, binding molecules can be divided into the five major classes of intact antibodies: IgA, IgD, IgE, IgG, and IgM, and several of these may be further divided into subclasses (isotypes), e.g., IgA1, IgA2, IgG1, IgG2, IgG3 and IgG4.

[0034] Antigen-binding fragments include, inter alia, Fab, F(ab′), F(ab′)₂, Fv, dAb, Fd, complementarity determining region (CDR) fragments, single-chain antibodies (scFv), bivalent single-chain antibodies, single-chain phage antibodies, diabodies, triabodies, tetrabodies, (poly)peptides that contain at least a fragment of an immunoglobulin that is sufficient to confer specific antigen binding to the (poly)peptide, etc. The above fragments may be produced synthetically or by enzymatic or chemical cleavage of intact immunoglobulins or they may be genetically engineered by recombinant DNA techniques. The methods of production are well known in the art and are described, for example, in Antibodies: A Laboratory Manual, Edited by: E. Harlow and D. Lane (1988), Cold Spring Harbor Laboratory, Cold Spring Harbor, N.Y., which is incorporated herein by reference. A binding molecule or antigen-binding fragment thereof may have one or more binding sites. If there is more than one binding site, the binding sites may be identical to one another or they may be different.

[0035] The binding molecule can be a naked or unconjugated binding molecule but can also be part of an immunoconjugate. A naked or unconjugated binding molecule is intended to refer to a binding molecule that is not conjugated, operatively linked or otherwise physically or functionally associated with an effector moiety or tag, such as inter alia a toxic substance, a radioactive substance, a liposome, an enzyme. It will be understood that naked or unconjugated binding molecules do not exclude binding molecules that have been stabilized, multimerized, humanized or in any other way manipulated, other than by the attachment of an effector moiety or tag. Accordingly, all post-translationally modified naked and unconjugated binding molecules are included herewith, including where the modifications are made in the natural binding molecule-producing cell environment, by a recombinant binding molecule-producing cell, and are introduced by the hand of man after initial binding molecule preparation. Of course, the term naked or unconjugated binding molecule does not exclude the ability of the binding molecule to form functional associations with effector cells and/or molecules after administration to the body, as some of such interactions are necessary in order to exert a biological effect. The lack of associated effector group or tag is, therefore, applied in definition to the naked or unconjugated binding molecule in vitro, not in vivo.

[0036] Biological sample. As used herein, the term “biological sample” encompasses a variety of sample types, including blood and other liquid samples of biological origin, solid tissue samples such as a biopsy specimen or tissue cultures, or cells derived therefrom and the progeny thereof. The term also includes samples that have been manipulated in any way after their procurement, such as by treatment with reagents, solubilization, or enrichment for certain components, such as proteins or polynucleotides. The term encompasses various kinds of clinical samples obtained from any species, and also includes cells in culture, cell supernatants and cell lysates.

[0037] Complementary determining regions (CDR). The term “complementary determining regions” as used herein means sequences within the variable regions of binding molecules, such as immunoglobulins, that usually contribute to a large extent to the antigen binding site which is complementary in shape and charge distribution to the epitope recognized on the antigen. The CDR regions can be specific for linear epitopes, discontinuous epitopes, or conformational epitopes of proteins or protein fragments, either as present on the protein in its native conformation or, in some cases, as present on the proteins as denatured, e.g., by solubilization in SDS. Epitopes may also consist of posttranslational modifications of proteins.

[0038] Deletion. The term “deletion,” as used herein, denotes a change in either amino acid or nucleotide sequence in which one or more amino acid or nucleotide residues, respectively, are absent as compared to the parent, often the naturally occurring, molecule.

[0039] Expression-regulating nucleic acid sequence. The term “expression-regulating nucleic acid sequence” as used herein refers to polynucleotide sequences necessary for and/or affecting the expression of an operably linked coding sequence in a particular host organism. The expression-regulating nucleic acid sequences, such as inter alia appropriate transcription initiation, termination, promoter, enhancer sequences; repressor or activator sequences; efficient RNA processing signals such as splicing and polyadenylation signals; sequences that stabilize cytoplasmic mRNA; sequences that enhance translation efficiency (e.g., ribosome binding sites); sequences that enhance protein stability; and when desired, sequences that enhance protein secretion, can be any nucleic acid sequence showing activity in the host organism of choice and can be derived from genes encoding proteins, which are either homologous or heterologous to the host organism. The identification and employment of expression-regulating sequences is routine to the person skilled in the art.

[0040] Functional variant. The term “functional variant,” as used herein, refers to a binding molecule that comprises a nucleotide and/or amino acid sequence that is altered by one or more nucleotides and/or amino acids compared to the nucleotide and/or amino acid sequences of the parent binding molecule and that is still capable of competing for binding to the binding partner, e.g., SARS-CoV, with the parent binding molecule. In other words, the modifications in the amino acid and/or nucleotide sequence of the parent binding molecule do not significantly affect or alter the binding characteristics of the binding molecule encoded by the nucleotide sequence or containing the amino acid sequence, i.e., the binding molecule is still able to recognize and bind its target. The functional variant may have conservative sequence modifications including nucleotide and amino acid substitutions, additions and deletions. These modifications can be introduced by standard techniques known in the art, such as site-directed mutagenesis and random PCR-mediated mutagenesis, and may comprise natural as well as non-natural nucleotides and amino acids.

[0041] Conservative amino acid substitutions include the ones in which the amino acid residue is replaced with an amino acid residue having similar structural or chemical properties. Families of amino acid residues having similar side chains have been defined in the art. These families include amino acids with basic side chains (e.g., lysine, arginine, histidine), acidic side chains (e.g., aspartic acid, glutamic acid), uncharged polar side chains (e.g., glycine, asparagine, glutamine, serine, threonine, tyrosine, cysteine, tryptophan), nonpolar side chains (e.g., alanine, valine, leucine, isoleucine, proline, phenylalanine, methionine), beta-branched side chains (e.g., threonine, valine, isoleucine) and aromatic side chains (e.g., tyrosine, phenylalanine, tryptophan, histidine). It will be clear to the skilled artisan that other classifications of amino acid residue families than the one used above can also be employed. Furthermore, a variant may have non-conservative amino acid substitutions, e.g., replacement of an amino acid with an amino acid residue having different structural or chemical properties. Similar minor variations may also include amino acid deletions or insertions, or both. Guidance in determining which amino acid residues may be substituted, inserted, or deleted without abolishing immunological activity may be found using computer programs well known in the art.

[0042] A mutation in a nucleotide sequence can be a single alteration made at a locus (a point mutation), such as transition or transversion mutations, or alternatively, multiple nucleotides may be inserted, deleted or changed at a single locus. In addition, one or more alterations may be made at any number of loci within a nucleotide sequence. The mutations may be performed by any suitable method known in the art.

[0043] Host. The term “host,” as used herein, is intended to refer to an organism or a cell into which a vector such as a cloning vector or an expression vector has been introduced. The organism or cell can be prokaryotic or eukaryotic. It should be understood that this term is intended to refer not only to the particular subject organism or cell, but to the progeny of such an organism or cell as well. Because certain modifications may occur in succeeding generations due to either mutation or environmental influences, such progeny may not, in fact, be identical to the parent organism or cell, but are still included within the scope of the term “host” as used herein.

[0044] Human. The term “human,” when applied to binding molecules as defined herein, refers to molecules that are either directly derived from a human or based upon a human sequence. When a binding molecule is derived from or based on a human sequence and subsequently modified, it is still to be considered human as used throughout the specification. In other words, the term human, when applied to binding molecules is intended to include binding molecules having variable and constant regions derived from human germline immunoglobulin sequences based on variable or constant regions either or not occurring in a human or human lymphocyte or in modified form. Thus, the human binding molecules may include amino acid residues not encoded by human germline immunoglobulin sequences, comprise substitutions and/or deletions (e.g., mutations introduced by for instance random or site-specific mutagenesis in vitro or by somatic mutation in vivo). “Based on” as used herein refers to the situation that a nucleic acid sequence may be exactly copied from a template, or with minor mutations, such as by error-prone PCR methods, or synthetically made matching the template exactly or with minor modifications. Semisynthetic molecules based on human sequences are also considered to be human as used herein.

[0045] Insertion. The term “insertion,” also known as the term “addition,” denotes a change in an amino acid or nucleotide sequence resulting in the addition of one or more amino acid or nucleotide residues, respectively, as compared to the parent, often the naturally occurring, molecule.

[0046] Isolated. The term “isolated,” when applied to binding molecules as defined herein, refers to binding molecules that are substantially free of other proteins or polypeptides, particularly free of other binding molecules having different antigenic specificities, and are also substantially free of other cellular material and/or chemicals. For example, when the binding molecules are recombinantly produced, they are preferably substantially free of culture medium, and when the binding molecules are produced by chemical synthesis, they are preferably substantially free of chemical precursors or other chemicals, i.e., they are separated from chemical precursors or other chemicals which are involved in the synthesis of the protein. The term “isolated” when applied to nucleic acid molecules encoding binding molecules as defined herein, is intended to refer to nucleic acid molecules in which the nucleotide sequences encoding the binding molecules are free of other nucleotide sequences, particularly nucleotide sequences encoding binding molecules that bind binding partners other than SARS-CoV. Furthermore, the term “isolated” refers to nucleic acid molecules that are substantially separated from other cellular components that naturally accompany the native nucleic acid molecule in its natural host, e.g., ribosomes, polymerases, or genomic sequences with which it is naturally associated. Moreover, “isolated” nucleic acid molecules, such as a cDNA molecules, can be substantially free of other cellular material, or culture medium when produced by recombinant techniques, or substantially free of chemical precursors or other chemicals when chemically synthesized.

[0047] Monoclonal antibody. The term “monoclonal antibody” as used herein refers to a preparation of antibody molecules of single molecular composition. A monoclonal antibody displays a single binding specificity and affinity for a particular epitope. Accordingly, the term “human monoclonal antibody” refers to an antibody displaying a single binding specificity which has variable and constant regions derived from or based on human germline immunoglobulin sequences or derived from completely synthetic sequences. The method of preparing the monoclonal antibody is not relevant.

[0048] Naturally occurring. The term “naturally occurring” as used herein as applied to an object refers to the fact that an object can be found in nature. For example, a polypeptide or polynucleotide sequence that is present in an organism that can be isolated from a source in nature and which has not been intentionally modified by man in the laboratory is naturally occurring.

[0049] Nucleic acid molecule. The term “nucleic acid molecule,” as used in the present invention, refers to a polymeric form of nucleotides and includes both sense and antisense strands of RNA, cDNA, genomic DNA, and synthetic forms and mixed polymers of the above. A nucleotide refers to a ribonucleotide, deoxynucleotide or a modified form of either type of nucleotide. The term also includes single- and double-stranded forms of DNA. In addition, a polynucleotide may include either or both naturally occurring and modified nucleotides linked together by naturally occurring and/or non-naturally occurring nucleotide linkages. The nucleic acid molecules may be modified chemically or biochemically or may contain non-natural or derivatized nucleotide bases, as will be readily appreciated by those of skill in the art. Such modifications include, for example, labels, methylation, substitution of one or more of the naturally occurring nucleotides with an analog, internucleotide modifications such as uncharged linkages (e.g., methyl phosphonates, phosphotriesters, phosphoramidates, carbamates, etc.), charged linkages (e.g., phosphorothioates, phosphorodithioates, etc.), pendent moieties (e.g., polypeptides), intercalators (e.g., acridine, psoralen, etc.), chelators, alkylators, and modified linkages (e.g., alpha anomeric nucleic acids, etc.). The above term is also intended to include any topological conformation, including single-stranded, double-stranded, partially duplexed, triplex, hairpinned, circular and padlocked conformations. Also included are synthetic molecules that mimic polynucleotides in their ability to bind to a designated sequence via hydrogen bonding and other chemical interactions. Such molecules are known in the art and include, for example, those in which peptide linkages substitute for phosphate linkages in the backbone of the molecule. A reference to a nucleic acid sequence encompasses its complement unless otherwise specified. Thus, a reference to a nucleic acid molecule having a particular sequence should be understood to encompass its complementary strand, with its complementary sequence. The complementary strand is also useful, e.g., for antisense therapy, hybridization probes and PCR primers.

[0050] Operably linked. The term “operably linked” refers to two or more nucleic acid sequence elements that are usually physically linked and are in a functional relationship with each other. For instance, a promoter is operably linked to a coding sequence if the promoter is able to initiate or regulate the transcription or expression of a coding sequence, in which case the coding sequence should be understood as being “under the control of” the promoter.

[0051] Pharmaceutically acceptable excipient. By “pharmaceutically acceptable excipient” is meant any inert substance that is combined with an active molecule such as a drug, agent, or binding molecule for preparing an agreeable or convenient dosage form. The “pharmaceutically acceptable excipient” is an excipient that is non-toxic to recipients at the dosages and concentrations employed and is compatible with other ingredients of the formulation comprising the drug, agent or binding molecule.

[0052] Specifically Binding. The term “specifically binding,” as used herein, in reference to the interaction of a binding molecule, e.g., an antibody, and its binding partner, e.g., an antigen, means that the interaction is dependent upon the presence of a particular structure, e.g., an antigenic determinant or epitope, on the binding partner. In other words, the antibody preferentially binds or recognizes the binding partner even when the binding partner is present in a mixture of other molecules or organisms. The binding may be mediated by covalent or non-covalent interactions or a combination of both. In yet other words, the term “specifically binding” means immunospecifically binding to an antigen or a fragment thereof and not immunospecifically binding to other antigens. A binding molecule that immunospecifically binds to an antigen may bind to other peptides or polypeptides with lower affinity as determined by, e.g., radioimmunoassays (RIA), enzyme-linked immunosorbent assays (ELISA), BIACORE, or other assays known in the art. Binding molecules or fragments thereof that immunospecifically bind to an antigen may be cross-reactive with related antigens. Preferably, binding molecules or fragments thereof that immunospecifically bind to an antigen do not cross-react with other antigens.

[0053] Substitutions. A “substitution,” as used herein, denotes the replacement of one or more amino acids or nucleotides by different amino acids or nucleotides, respectively.

[0054] Therapeutically effective amount. The term “therapeutically effective amount” refers to an amount of the binding molecule as defined herein that is effective for preventing, ameliorating and/or treating a condition resulting from infection with SARS-CoV.

[0055] Treatment. The term “treatment” refers to therapeutic treatment as well as prophylactic or preventative measures to cure or halt or at least retard disease progress. Those in need of treatment include those already inflicted with a condition resulting from infection with SARS-CoV as well as those in which infection with SARS-CoV is to be prevented. Subjects partially or totally recovered form infection with SARS-CoV might also be in need of treatment. Prevention encompasses inhibiting or reducing the spread of SARS-CoV or inhibiting or reducing the onset, development or progression of one or more of the symptoms associated with infection with SARS-CoV.

[0056] Vector. The term “vector” denotes a nucleic acid molecule into which a second nucleic acid molecule can be inserted for introduction into a host where it will be replicated, and in some cases expressed. In other words, a vector is capable of transporting a nucleic acid molecule to which it has been linked. Cloning as well as expression vectors are contemplated by the term “vector,” as used herein. Vectors include, but are not limited to, plasmids, cosmids, bacterial artificial chromosomes (BAC) and yeast artificial chromosomes (YAC) and vectors derived from bacteriophages or plant or animal (including human) viruses. Vectors comprise an origin of replication recognized by the proposed host and in case of expression vectors, promoter and other regulatory regions recognized by the host. A vector containing a second nucleic acid molecule is introduced into a cell by transformation, transfection, or by making use of viral entry mechanisms. Certain vectors are capable of autonomous replication in a host into which they are introduced (e.g., vectors having a bacterial origin of replication can replicate in bacteria). Other vectors can be integrated into the genome of a host upon introduction into the host, and thereby are replicated along with the host genome.

### SUMMARY OF THE INVENTION

[0057] The invention provides binding molecules capable of specifically binding to SARS-CoV. In a preferred embodiment, the binding molecules are human binding molecules. Furthermore, the invention pertains to nucleic acid molecules encoding at least the binding region of the binding molecules. The invention further provides for the use of the binding molecules of the invention in the prophylaxis and/or treatment of a subject having, or at risk of developing, a condition resulting from SARS-CoV. Besides that, the invention pertains to the use of the binding molecules of the invention in the diagnosis/detection of SARS-CoV.

### DETAILED DESCRIPTION OF THE INVENTION

[0058] In a first aspect, the present invention encompasses binding molecule capable of specifically binding to SARS-CoV. The binding molecules may be capable of specifically binding to SARS-CoV in activated or inactivated/attenuated form. Methods for inactivating/attenuating viruses are well known in the art and include, but are not limited to, heat inactivation, inactivation by UV irradiation, inactivation by gamma irradiation. The binding molecules may also be capable of specifically binding to one or more fragments of the SARS-CoV such as inter alia a preparation of one or more proteins and/or (poly)peptides derived from SARS-CoV. For methods of treatment and/or prevention of SARS the binding molecules are preferably capable of specifically binding to surface accessible proteins, which include, but are not limited to, inner and outer membrane proteins, proteins adhering to the cell wall, and potential secreted proteins. Surface accessible proteins of SARS-CoV include, but are not limited to, the spike protein, the membrane (matrix) protein, the (small) envelope protein, Orf 3, Orf 4, Orf 7, Orf 8, Orf 9, Orf 10 and Orf 14. For diagnostical purposes the binding molecules may also be capable of specifically binding to proteins not present on the surface of SARS-CoV. Therefore, proteins including, but not limited to, the nucleocapsid (N) protein, Orf 11 and Orf 13 may be used. The amino acid sequence of proteins and potential proteins of various known strains of SARS-CoV can be found in the EMBL-database and/or other databases. For instance the complete genome of the SARS coronavirus Urbani can be found in the EMBL-database under accession number AY278741, the complete genome of the SARS coronavirus HSR 1 can be found under accession number AY323977, the complete genome of the SARS coronavirus Frankfurt 1 can be found under accession number AY291315 and the complete genome of the SARS coronavirus TOR2 can be found under accession number AY274119. Preferably, the fragment at least comprises an antigenic determinant recognized by the binding molecules of the invention. An “antigenic determinant” as used herein is a moiety, such as a SARS-CoV (poly)peptide, protein, glycoprotein, analog or fragment thereof, that is capable of binding to a binding molecule of the invention with sufficiently high affinity to form a detectable antigen-binding molecule complex.

[0059] The binding molecules, according to the invention, are preferably human binding molecules, preferably human monoclonal antibodies. They can be intact immunoglobulin molecules such as polyclonal or monoclonal antibodies, in particular human monoclonal antibodies, or the binding molecules can be antigen-binding fragments including, but not limited to, Fab, F(ab′), F(ab′)₂, Fv, dAb, Fd, complementarity determining region (CDR) fragments, single-chain antibodies (scFv), bivalent single-chain antibodies, single-chain phage antibodies, diabodies, triabodies, tetrabodies, and (poly)peptides that contain at least a fragment of an immunoglobulin that is sufficient to confer specific antigen binding to the SARS-CoV or fragment thereof. The binding molecules of the invention can be used in non-isolated or isolated form. Furthermore, the binding molecules of the invention can be used alone or in a mixture comprising at least one binding molecule (or variant or fragment thereof). In other words, the binding molecules can be used in combination, e.g., as a pharmaceutical composition comprising two or more binding molecules, variants or fragments thereof. For example, binding molecules having different, but complementary activities can be combined in a single therapy to achieve a desired prophylactic, therapeutic or diagnostic effect, but alternatively, binding molecules having identical activities can also be combined in a single therapy to achieve a desired prophylactic, therapeutic or diagnostic effect. The mixture may further comprise at least one other therapeutic agent. Preferably, the therapeutic agent is useful in the prophylaxis and/or treatment of a condition resulting from SARS-CoV.

[0060] Typically, binding molecules according to the invention can bind to their binding partners, i.e., SARS-CoV or fragments thereof, with an affinity constant (K_{d}-value) that is lower than 0.2*10⁻⁴ M, 1.0*10⁻⁵ M, 1.0*10⁻⁶ M, 1.0*10⁻⁷ M, preferably lower than 1.0*10⁻⁸ M, more preferably lower than 1.0*10⁻⁹ M, more preferably lower than 1.0*10⁻¹⁰ M, even more preferably lower than 1.0*10⁻¹¹ M, and in particular lower than 1.0*10⁻¹² M. The affinity constants can vary for antibody isotypes. For example, affinity binding for an IgM isotype refers to a binding affinity of at least about 1.0*10⁻⁷ M. Affinity constants can for instance be measured using surface plasmon resonance, i.e., an optical phenomenon that allows for the analysis of real-time biospecific interactions by detection of alterations in protein concentrations within a biosensor matrix, for example, using the BIACORE system (Pharmacia Biosensor AB, Uppsala, Sweden).

[0061] The binding molecules according to the invention may bind to SARS-CoV in soluble form such as for instance in a sample or may bind to SARS-CoV bound or attached to a carrier or substrate, e.g., microtiter plates, membranes and beads, etc. Carriers or substrates may be made of glass, plastic (e.g., polystyrene), polysaccharides, nylon, nitrocellulose, or teflon, etc. The surface of such supports may be solid or porous and of any convenient shape. Furthermore, the binding molecules may bind to SARS-CoV in purified/isolated or non-purified/non-isolated form.

[0062] In a preferred embodiment of the invention, the binding molecules of the invention neutralize SARS-CoV infectivity. This may be achieved by preventing the attachment of SARS-CoV to possible receptors on host cells or inhibition of the release of RNA into the cytoplasm of the cell or prevention of RNA transcription or translation. In a specific embodiment, the binding molecules of the invention prevent SARS-CoV from infecting host cells by at least 99%, at least 95%, at least 90%, at least 85%, at least 80%, at least 75%, at least 70%, at least 60%, at least 50%, at least 45%, at least 40%, at least 45%, at least 35%, at least 30%, at least 25%, at least 20%, or at least 10% relative to infection of host cells by SARS-CoV in the absence of the binding molecules. Neutralization can for instance be measured as described herein.

[0063] Binding molecules of the invention, which do not prevent SARS-CoV from binding its host cell receptor, but inhibit or down-regulate SARS-CoV replication, can also be administered to a mammal to treat, prevent or ameliorate one or more symptoms associated with a SARS-CoV infection. The ability of a binding molecule to inhibit or down-regulate SARS-CoV replication may be determined by techniques known in the art, for example, the inhibition or down-regulation of SARS-CoV replication can be determined by detecting the SARS-CoV titer in a biological sample of a mammal, preferably a human. A binding molecule of the present invention may inhibit or down-regulate SARS-CoV replication by at least 99%, at least 95%, at least 90%, at least 85%, at least 80%, at least 75%, at least 70%, at least 60%, at least 50%, at least 45%, at least 40%, at least 45%, at least 35%, at least 30%, at least 25%, at least 20%, or at least 10% relative to SARS-CoV replication in absence of the binding molecules. Furthermore, the binding molecules of the invention may be complement-fixing binding molecules capable of assisting in the lysis of enveloped SARS-CoV. The binding molecules of the invention might also act as opsonins and augment phagocytosis of SARS-CoV either by promoting its uptake via Fc or C3b receptors or by agglutinating SARS-CoV to make it more easily phagocytosed.

[0064] In a preferred embodiment, the binding molecules according to the invention comprise at least a CDR3 region, preferably a heavy chain CDR3 region, comprising the amino acid sequence selected from the group consisting of SEQ ID NO:1, SEQ ID NO:2, SEQ ID NO:3, SEQ ID NO:4, SEQ ID NO:5, SEQ ID NO:6, SEQ ID NO:7, SEQ ID NO:8, SEQ ID NO:9, SEQ ID NO:10, SEQ ID NO:11, SEQ ID NO:12, SEQ ID NO:13, SEQ ID NO:75, SEQ ID NO:76, SEQ ID NO:77, SEQ ID NO:78, SEQ ID NO:291, SEQ ID NO:292, SEQ ID NO:293, SEQ ID NO:294, SEQ ID NO:295, SEQ ID NO:296, SEQ ID NO:297, SEQ ID NO:298, SEQ ID NO:299, SEQ ID NO:300 and SEQ ID NO:301.

[0065] In yet another embodiment, the binding molecules according to the invention comprise a variable heavy chain comprising an amino acid sequence selected from the group consisting of SEQ ID NO:15, SEQ ID NO:17, SEQ ID NO:19, SEQ ID NO:21, SEQ ID NO:23, SEQ ID NO:25, SEQ ID NO:27, SEQ ID NO:29, SEQ ID NO:31, SEQ ID NO:33, SEQ ID NO:35, SEQ ID NO:37, SEQ ID NO:39, SEQ ID NO:80, SEQ ID NO:82, SEQ ID NO:84, SEQ ID NO:86, SEQ ID NO:303, SEQ ID NO:307, SEQ ID NO:311, SEQ ID NO:315, SEQ ID NO:319, SEQ ID NO:323, SEQ ID NO:327, SEQ ID NO:331, SEQ ID NO:335, SEQ ID NO:339, SEQ ID NO:343, SEQ ID NO:347, SEQ ID NO:351, SEQ ID NO:355, SEQ ID NO:359, SEQ ID NO:363, SEQ ID NO:367, SEQ ID NO:371, SEQ ID NO:375, SEQ ID NO:379, SEQ ID NO:383, SEQ ID NO:387, SEQ ID NO:391, SEQ ID NO:395, SEQ ID NO:399, SEQ ID NO:403, SEQ ID NO:407, SEQ ID NO:411, SEQ ID NO:415, SEQ ID NO:419, SEQ ID NO:423, SEQ ID NO:427, SEQ ID NO:431, SEQ ID NO:435, SEQ ID NO:439, SEQ ID NO:443, SEQ ID NO:447, SEQ ID NO:451, SEQ ID NO:455 and SEQ ID NO:459.

[0066] In a further embodiment, the binding molecules according to the invention comprise a variable heavy chain comprising the amino acid sequence of SEQ ID NO:15 and a variable light chain comprising the amino acid sequence of SEQ ID NO:41, a variable heavy chain comprising the amino acid sequence of SEQ ID NO:17 and a variable light chain comprising the amino acid sequence of SEQ ID NO:41, a variable heavy chain comprising the amino acid sequence of SEQ ID NO:19 and a variable light chain comprising the amino acid sequence of SEQ ID NO:41, a variable heavy chain comprising the amino acid sequence of SEQ ID NO:21 and a variable light chain comprising the amino acid sequence of SEQ ID NO:41, a variable heavy chain comprising the amino acid sequence of SEQ ID NO:23 and a variable light chain comprising the amino acid sequence of SEQ ID NO:43, a variable heavy chain comprising the amino acid sequence of SEQ ID NO:25 and a variable light chain comprising the amino acid sequence of SEQ ID NO:41, a variable heavy chain comprising the amino acid sequence of SEQ ID NO:27 and a variable light chain comprising the amino acid sequence of SEQ ID NO:41, a variable heavy chain comprising the amino acid sequence of SEQ ID NO:29 and a variable light chain comprising the amino acid sequence of SEQ ID NO:41, a variable heavy chain comprising the amino acid sequence of SEQ ID NO:31 and a variable light chain comprising the amino acid sequence of SEQ ID NO:41, a variable heavy chain comprising the amino acid sequence of SEQ ID NO:33 and a variable light chain comprising the amino acid sequence of SEQ ID NO:45, a variable heavy chain comprising the amino acid sequence of SEQ ID NO:35 and a variable light chain comprising the amino acid sequence of SEQ ID NO:41, a variable heavy chain comprising the amino acid sequence of SEQ ID NO:37 and a variable light chain comprising the amino acid sequence of SEQ ID NO:41, a variable heavy chain comprising the amino acid sequence of SEQ ID NO:39 and a variable light chain comprising the amino acid sequence of SEQ ID NO:45, a variable heavy chain comprising the amino acid sequence of SEQ ID NO:80 and a variable light chain comprising the amino acid sequence of SEQ ID NO:41, a variable heavy chain comprising the amino acid sequence of SEQ ID NO:82 and a variable light chain comprising the amino acid sequence of SEQ ID NO:41, a variable heavy chain comprising the amino acid sequence of SEQ ID NO:84 and a variable light chain comprising the amino acid sequence of SEQ ID NO:88, a variable heavy chain comprising the amino acid sequence of SEQ ID NO:86 and a variable light chain comprising the amino acid sequence of SEQ ID NO:41, a variable heavy chain comprising the amino acid sequence of SEQ ID NO:303 and a variable light chain comprising the amino acid sequence of SEQ ID NO:305, a variable heavy chain comprising the amino acid sequence of SEQ ID NO:307 and a variable light chain comprising the amino acid sequence of SEQ ID NO:309, a variable heavy chain comprising the amino acid sequence of SEQ ID NO:311 and a variable light chain comprising the amino acid sequence of SEQ ID NO:313, a variable heavy chain comprising the amino acid sequence of SEQ ID NO:315 and a variable light chain comprising the amino acid sequence of SEQ ID NO:317, a variable heavy chain comprising the amino acid sequence of SEQ ID NO:319 and a variable light chain comprising the amino acid sequence of SEQ ID NO:321, a variable heavy chain comprising the amino acid sequence of SEQ ID NO:323 and a variable light chain comprising the amino acid sequence of SEQ ID NO:325, a variable heavy chain comprising the amino acid sequence of SEQ ID NO:327 and a variable light chain comprising the amino acid sequence of SEQ ID NO:329, a variable heavy chain comprising the amino acid sequence of SEQ ID NO:331 and a variable light chain comprising the amino acid sequence of SEQ ID NO:333, a variable heavy chain comprising the amino acid sequence of SEQ ID NO:335 and a variable light chain comprising the amino acid sequence of SEQ ID NO:337, a variable heavy chain comprising the amino acid sequence of SEQ ID NO:339 and a variable light chain comprising the amino acid sequence of SEQ ID NO:341, a variable heavy chain comprising the amino acid sequence of SEQ ID NO:343 and a variable light chain comprising the amino acid sequence of SEQ ID NO:345, a variable heavy chain comprising the amino acid sequence of SEQ ID NO:347 and a variable light chain comprising the amino acid sequence of SEQ ID NO:349, a variable heavy chain comprising the amino acid sequence of SEQ ID NO:351 and a variable light chain comprising the amino acid sequence of SEQ ID NO:353, a variable heavy chain comprising the amino acid sequence of SEQ ID NO:355 and a variable light chain comprising the amino acid sequence of SEQ ID NO:357, a variable heavy chain comprising the amino acid sequence of SEQ ID NO:359 and a variable light chain comprising the amino acid sequence of SEQ ID NO:361, a variable heavy chain comprising the amino acid sequence of SEQ ID NO:363 and a variable light chain comprising the amino acid sequence of SEQ ID NO:365, a variable heavy chain comprising the amino acid sequence of SEQ ID NO:367 and a variable light chain comprising the amino acid sequence of SEQ ID NO:369, a variable heavy chain comprising the amino acid sequence of SEQ ID NO:371 and a variable light chain comprising the amino acid sequence of SEQ ID NO:373, a variable heavy chain comprising the amino acid sequence of SEQ ID NO:375 and a variable light chain comprising the amino acid sequence of SEQ ID NO:377, a variable heavy chain comprising the amino acid sequence of SEQ ID NO:379 and a variable light chain comprising the amino acid sequence of SEQ ID NO:381, a variable heavy chain comprising the amino acid sequence of SEQ ID NO:383 and a variable light chain comprising the amino acid sequence of SEQ ID NO:385, a variable heavy chain comprising the amino acid sequence of SEQ ID NO:387 and a variable light chain comprising the amino acid sequence of SEQ ID NO:389, a variable heavy chain comprising the amino acid sequence of SEQ ID NO:391 and a variable light chain comprising the amino acid sequence of SEQ ID NO:393, a variable heavy chain comprising the amino acid sequence of SEQ ID NO:395 and a variable light chain comprising the amino acid sequence of SEQ ID NO:397, a variable heavy chain comprising the amino acid sequence of SEQ ID NO:399 and a variable light chain comprising the amino acid sequence of SEQ ID NO:401, a variable heavy chain comprising the amino acid sequence of SEQ ID NO:403 and a variable light chain comprising the amino acid sequence of SEQ ID NO:405, a variable heavy chain comprising the amino acid sequence of SEQ ID NO:407 and a variable light chain comprising the amino acid sequence of SEQ ID NO:409, a variable heavy chain comprising the amino acid sequence of SEQ ID NO:411 and a variable light chain comprising the amino acid sequence of SEQ ID NO:413, a variable heavy chain comprising the amino acid sequence of SEQ ID NO:415 and a variable light chain comprising the amino acid sequence of SEQ ID NO:417, a variable heavy chain comprising the amino acid sequence of SEQ ID NO:419 and a variable light chain comprising the amino acid sequence of SEQ ID NO:421, a variable heavy chain comprising the amino acid sequence of SEQ ID NO:423 and a variable light chain comprising the amino acid sequence of SEQ ID NO:425, a variable heavy chain comprising the amino acid sequence of SEQ ID NO:427 and a variable light chain comprising the amino acid sequence of SEQ ID NO:429, a variable heavy chain comprising the amino acid sequence of SEQ ID NO:431 and a variable light chain comprising the amino acid sequence of SEQ ID NO:433, a variable heavy chain comprising the amino acid sequence of SEQ ID NO:435 and a variable light chain comprising the amino acid sequence of SEQ ID NO:437, a variable heavy chain comprising the amino acid sequence of SEQ ID NO:439 and a variable light chain comprising the amino acid sequence of SEQ ID NO:441, a variable heavy chain comprising the amino acid sequence of SEQ ID NO:443 and a variable light chain comprising the amino acid sequence of SEQ ID NO:445, a variable heavy chain comprising the amino acid sequence of SEQ ID NO:447 and a variable light chain comprising the amino acid sequence of SEQ ID NO:449, a variable heavy chain comprising the amino acid sequence of SEQ ID NO:451 and a variable light chain comprising the amino acid sequence of SEQ ID NO:453, a variable heavy chain comprising the amino acid sequence of SEQ ID NO:455 and a variable light chain comprising the amino acid sequence of SEQ ID NO:457, or a variable heavy chain comprising the amino acid sequence of SEQ ID NO:459 and a variable light chain comprising the amino acid sequence of SEQ ID NO:461.

[0067] In an embodiment of the invention, the binding molecules having SARS-CoV neutralizing activity are the binding molecules comprising at least a CDR3 region, preferably a heavy chain CDR3 region, comprising the amino acid sequence selected from the group consisting of SEQ ID NO:11 and SEQ ID NO:12. In a further embodiment, the binding molecules having SARS-CoV neutralizing activity are the binding molecules comprising a variable heavy chain comprising an amino acid sequence selected from the group consisting of SEQ ID NO:35 and SEQ ID NO:37. In yet a further embodiment, the binding molecules having SARS-CoV neutralizing activity are the binding molecules comprising a variable heavy chain comprising the amino acid sequence of SEQ ID NO:35 and a variable light chain comprising the amino acid sequence of SEQ ID NO:41 or a variable heavy chain comprising the amino acid sequence of SEQ ID NO:37 and a variable light chain comprising the amino acid sequence of SEQ ID NO:41. In a preferred embodiment the binding molecules having SARS-CoV neutralizing activity of the invention are administered in IgG1 or IgA (for instance for mucosal administration) format.

[0068] Another aspect of the invention includes functional variants of binding molecules as defined herein. Molecules are considered to be functional variants of a binding molecule according to the invention, if the variants are capable of competing for specifically binding to SARS-CoV or a fragment thereof with the parent binding molecules. In other words, when the functional variants are still capable of binding to SARS-CoV or a fragment thereof. Functional variants include, but are not limited to, derivatives that are substantially similar in primary structural sequence, but which contain e.g., in vitro or in vivo modifications, chemical and/or biochemical, that are not found in the parent binding molecule. Such modifications include inter alia acetylation, acylation, ADP-ribosylation, amidation, covalent attachment of flavin, covalent attachment of a heme moiety, covalent attachment of a nucleotide or nucleotide derivative, covalent attachment of a lipid or lipid derivative, covalent attachment of phosphotidylinositol, cross-linking, cyclization, disulfide bond formation, demethylation, formation of covalent cross-links, formation of cysteine, formation of pyroglutamate, formylation, gamma-carboxylation, glycosylation, GPI-anchor formation, hydroxylation, iodination, methylation, myristoylation, oxidation, pegylation, proteolytic processing, phosphorylation, prenylation, racemization, selenoylation, sulfation, transfer-RNA mediated addition of amino acids to proteins such as arginylation, ubiquitination, and the like.

[0069] Alternatively, functional variants can be binding molecules as defined in the present invention comprising an amino acid sequence containing substitutions, insertions, deletions or combinations thereof of one or more amino acids compared to the amino acid sequences of the parent binding molecules. Furthermore, functional variants can comprise truncations of the amino acid sequence at either or both the amino or carboxy termini. Functional variants according to the invention may have the same or different, either higher or lower, binding affinities compared to the parent binding molecule but are still capable of binding to SARS-CoV or a fragment thereof. For instance, functional variants according to the invention may have increased or decreased binding affinities for SARS-CoV or a fragment thereof compared to the parent binding molecules. Preferably, the amino acid sequences of the variable regions, including, but not limited to, framework regions, hypervariable regions, in particular the CDR3 regions, are modified. Generally, the light chain and the heavy chain variable regions comprise three hypervariable regions, comprising three CDRs, and more conserved regions, the so-called framework regions (FRs). The hypervariable regions comprise amino acid residues from CDRs and amino acid residues from hypervariable loops. Functional variants intended to fall within the scope of the present invention have at least about 50% to about 99%, preferably at least about 60% to about 99%, more preferably at least about 70% to about 99%, even more preferably at least about 80% to about 99%, most preferably at least about 90% to about 99%, in particular at least about 95% to about 99%, and in particular at least about 97% to about 99% amino acid sequence homology with the parent binding molecules as defined herein. Computer algorithms such as inter alia Gap or Bestfit known to a person skilled in the art can be used to optimally align amino acid sequences to be compared and to define similar or identical amino acid residues. Functional variants can be obtained by altering the parent binding molecules or parts thereof by general molecular biology methods known in the art including, but not limited to, error-prone PCR, oligonucleotide-directed mutagenesis and site-directed mutagenesis. Preferably, the functional variants of the invention have SARS-CoV neutralizing activity. This neutralizing activity may either be higher or be lower compared to the parent binding molecules. Furthermore, the functional variants may inhibit or down-regulate SARS-CoV replication, are complement fixing binding molecules capable of assisting in the lysis of enveloped SARS-CoV and/or act as opsonins and augment phagocytosis of SARS-CoV either by promoting its uptake via Fc or C3b receptors or by agglutinating SARS-CoV to make it more easily phagocytosed.

[0070] In yet a further aspect, the invention includes immunoconjugates, i.e., molecules comprising at least one binding molecule or functional variant thereof as defined herein and further comprising at least one tag, such as inter alia a detectable moiety/agent. Also contemplated in the present invention are mixtures of immunoconjugates according to the invention or mixtures of at least one immunoconjugates according to the invention and another molecule, such as a therapeutic agent or another binding molecule or immunoconjugate. In a further embodiment, the immunoconjugates of the invention may comprise more than one tag. These tags can be the same or distinct from each other and can be joined/conjugated non-covalently to the binding molecules. The tag(s) can also be joined/conjugated directly to the binding molecules through covalent bonding, including, but not limited to, disulfide bonding, hydrogen bonding, electrostatic bonding, recombinant fusion and conformational bonding. Alternatively, the tag(s) can be joined/conjugated to the binding molecules by means of one or more linking compounds. Techniques for conjugating tags to binding molecules are well known to the skilled artisan.

[0071] The tags of the immunoconjugates of the present invention may be therapeutic agents, but preferably they are detectable moieties/agents. Immunoconjugates comprising a detectable agent can be used diagnostically to, for example, assess if a subject has been infected with SARS-CoV or monitor the development or progression of a SARS-CoV infection as part of a clinical testing procedure to, e.g., determine the efficacy of a given treatment regimen. However, they may also be used for other detection and/or analytical and/or diagnostic purposes. Detectable moieties/agents include, but are not limited to, enzymes, prosthetic groups, fluorescent materials, luminescent materials, bioluminescent materials, radioactive materials, positron emitting metals, and nonradioactive paramagnetic metal ions.

[0072] The tags used to label the binding molecules for detection and/or analytical and/or diagnostic purposes depend on the specific detection/analysis/diagnosis techniques and/or methods used such as inter alia immunohistochemical staining of (tissue) samples, flow cytometric detection, scanning laser cytometric detection, fluorescent immunoassays, enzyme-linked immunosorbent assays (ELISAs), radioimmunoassays (RIAs), bioassays (e.g., neutralization assays), Western blotting applications, etc. For immunohistochemical staining of tissue samples preferred labels are enzymes that catalyze production and local deposition of a detectable product. Enzymes typically conjugated to binding molecules to permit their immunohistochemical visualization are well-known and include, but are not limited to, acetylcholinesterase, alkaline phosphatase, beta-galactosidase, glucose oxidase, horseradish peroxidase, and urease. Typical substrates for production and deposition of visually detectable products include, but are not limited to, o-nitrophenyl-beta-D-galactopyranoside (ONPG), o-phenylenediamine dihydrochloride (OPD), p-nitrophenyl phosphate (PNPP), p-nitrophenyl-beta-D-galactopryanoside (PNPG), 3′, 3′-diaminobenzidine (DAB), 3-amino-9-ethylcarbazole (AEC), 4-chloro-1-naphthol (CN), 5-bromo-4-chloro-3-indolyl-phosphate (BCIP), ABTS, BluoGal, iodonitrotetrazolium (INT), nitroblue tetrazolium chloride (NBT), phenazine methosulfate (PMS), phenolphthalein monophosphate (PMP), tetramethyl benzidine (TMB), tetranitroblue tetrazolium (TNBT), X-Gal, X-Gluc, and X-glucoside. Other substrates that can be used to produce products for local deposition are luminescent substrates. For example, in the presence of hydrogen peroxide, horseradish peroxidase can catalyze the oxidation of cyclic diacylhydrazides such as luminol. Next to that, binding molecules of the immunoconjugate of the invention can also be labeled using colloidal gold or they can be labeled with radioisotopes, such as ³³p, ³²p, ³⁵S, ³H, and ¹²⁵I. Binding molecules of the invention can be attached to radionuclides directly or indirectly via a chelating agent by methods well known in the art.

[0073] When the binding molecules of the present invention are used for flow cytometric detections, scanning laser cytometric detections, or fluorescent immunoassays, they can usefully be labeled with fluorophores. A wide variety of fluorophores useful for fluorescently labeling the binding molecules of the present invention include, but are not limited to, Alexa Fluor and Alexa Fluor&commat dyes, BODIPY dyes, Cascade Blue, Cascade Yellow, Dansyl, lissamine rhodamine B, Marina Blue, Oregon Green 488, Oregon Green 514, Pacific Blue, rhodamine 6G, rhodamine green, rhodamine red, tetramethylrhodamine, Cy2, Cy3, Cy3.5, Cy5, Cy5.5, Cy7, fluorescein isothiocyanate (FITC), allophycocyanin (APC), R-phycoerythrin (PE), peridinin chlorophyll protein (PerCP), Texas Red, fluorescence resonance energy tandem fluorophores such as PerCP-Cy5.5, PE-Cy5, PE-Cy5.5, PE-Cy7, PE-Texas Red, and APC-Cy7. When the binding molecules of the present invention are used for secondary detection using labeled avidin, streptavidin, captavidin or neutravidin, the binding molecules may be labeled with biotin to form suitable prosthetic group complexes.

[0074] When the immunoconjugates of the invention are used for in vivo diagnostic use, the binding molecules can also be made detectable by conjugation to e.g., magnetic resonance imaging (MRI) contrast agents, such as gadolinium diethylenetriaminepentaacetic acid, to ultrasound contrast agents or to X-ray contrast agents, or by radioisotopic labeling.

[0075] A suitable luminescent material includes, but is not limited to, luminol and suitable bioluminescent materials include, but are not limited to, luciferase, luciferin, and aequorin.

[0076] Furthermore, the binding molecules, functional variants or immunoconjugates of the invention can also be attached to solid supports, which are particularly useful for in vitro immunoassays or purification of SARS-CoV or a fragment thereof. Such solid supports might be porous or nonporous, planar or nonplanar and include, but are not limited to, glass, cellulose, polyacrylamide, nylon, polystyrene, polyvinyl chloride or polypropylene supports. The binding molecules can also, for example, usefully be conjugated to filtration media, such as NHS-activated Sepharose or CNBr-activated Sepharose for purposes of immunoaffinity chromatography. They can also usefully be attached to paramagnetic microspheres, typically by biotin-streptavidin interaction. The microspheres can be used for isolation of SARS-CoV or a fragment thereof from a sample containing SARS-CoV or a fragment thereof. As another example, the binding molecules of the present invention can usefully be attached to the surface of a microtiter plate for ELISA.

[0077] The binding molecules of the present invention or functional fragments thereof can be fused to marker sequences, such as a peptide to facilitate purification. Examples include, but are not limited to, the hexa-histidine tag, the hemagglutinin (HA) tag, the myc tag or the flag tag.

[0078] Alternatively, an antibody can be conjugated to a second antibody to form an antibody heteroconjugate. In another aspect, the binding molecules of the invention may be conjugated/attached to one or more antigens. Preferably, these antigens are antigens which are recognized by the immune system of a subject to which the binding molecule-antigen conjugate is administered. The antigens may be identical but may also differ from each other. Conjugation methods for attaching the antigens and binding molecules are well known in the art and include, but are not limited to, the use of cross-linking agents. The binding molecules will bind to SARS-CoV and the antigens attached to the binding molecules will initiate a powerful T-cell attack on the conjugate which will eventually lead to the destruction of the SARS-CoV.

[0079] Next to producing immunoconjugates chemically by conjugating, directly or indirectly via for instance a linker, the immunoconjugates can be produced as fusion proteins comprising the binding molecules of the invention and a suitable tag. Fusion proteins can be produced by methods known in the art such as, e.g., recombinantly by constructing nucleic acid molecules comprising nucleotide sequences encoding the binding molecules in frame with nucleotide sequences encoding the suitable tag(s) and then expressing the nucleic acid molecules.

[0080] It is another aspect of the present invention to provide a nucleic acid molecule encoding at least a binding molecule or functional fragment thereof according to the invention. Such nucleic acid molecules can be used as intermediates for cloning purposes, e.g., in the process of affinity maturation described above. In a preferred embodiment, the nucleic acid molecules are isolated or purified.

[0081] The skilled man will appreciate that functional variants of these nucleic acid molecules are also intended to be a part of the present invention. Functional variants are nucleic acid sequences that can be directly translated, using the standard genetic code, to provide an amino acid sequence identical to that translated from the parent nucleic acid molecules.

[0082] Preferably, the nucleic acid molecules encode binding molecules comprising a CDR3 region, preferably a heavy chain CDR3 region, comprising an amino acid sequence selected from the group consisting of SEQ ID NO:1, SEQ ID NO:2, SEQ ID NO:3, SEQ ID NO:4, SEQ ID NO:5, SEQ ID NO:6, SEQ ID NO:7, SEQ ID NO:8, SEQ ID NO:9, SEQ ID NO:10, SEQ ID NO:11, SEQ ID NO:12, SEQ ID NO:13, SEQ ID NO:75, SEQ ID NO:76, SEQ ID NO:77, SEQ ID NO:78, SEQ ID NO:291, SEQ ID NO:292, SEQ ID NO:293, SEQ ID NO:294, SEQ ID NO:295, SEQ ID NO:296, SEQ ID NO:297, SEQ ID NO:298, SEQ ID NO:299, SEQ ID NO:300 and SEQ ID NO:301.

[0083] Even more preferably, the nucleic acid molecules encode binding molecules comprising a variable heavy chain comprising an amino acid sequence selected from the group consisting of SEQ ID NO:15, SEQ ID NO:17, SEQ ID NO:19, SEQ ID NO:21, SEQ ID NO:23, SEQ ID NO:25, SEQ ID NO:27, SEQ ID NO:29, SEQ ID NO:31, SEQ ID NO:33, SEQ ID NO:35, SEQ ID NO:37, SEQ ID NO:39, SEQ ID NO:80, SEQ ID NO:82, SEQ ID NO:84, SEQ ID NO:86, SEQ ID NO:303, SEQ ID NO:307, SEQ ID NO:311, SEQ ID NO:315, SEQ ID NO:319, SEQ ID NO:323, SEQ ID NO:327, SEQ ID NO:331, SEQ ID NO:335, SEQ ID NO:339, SEQ ID NO:343, SEQ ID NO:347, SEQ ID NO:351, SEQ ID NO:355, SEQ ID NO:359, SEQ ID NO:363, SEQ ID NO:367, SEQ ID NO:371, SEQ ID NO:375, SEQ ID NO:379, SEQ ID NO:383, SEQ ID NO:387, SEQ ID NO:391, SEQ ID NO:395, SEQ ID NO:399, SEQ ID NO:403, SEQ ID NO:407, SEQ ID NO:411, SEQ ID NO:415, SEQ ID NO:419, SEQ ID NO:423, SEQ ID NO:427, SEQ ID NO:431, SEQ ID NO:435, SEQ ID NO:439, SEQ ID NO:443, SEQ ID NO:447, SEQ ID NO:451, SEQ ID NO:455 and SEQ ID NO:459.

[0084] In yet another embodiment, the nucleic acid molecules encode binding molecules comprising a variable heavy chain comprising the amino acid sequence of SEQ ID NO:15 and a variable light chain comprising the amino acid sequence of SEQ ID NO:41, or they encode a variable heavy chain comprising the amino acid sequence of SEQ ID NO:17 and a variable light chain comprising the amino acid sequence of SEQ ID NO:41, or they encode a variable heavy chain comprising the amino acid sequence of SEQ ID NO:19 and a variable light chain comprising the amino acid sequence of SEQ ID NO:41, or they encode a variable heavy chain comprising the amino acid sequence of SEQ ID NO:21 and a variable light chain comprising the amino acid sequence of SEQ ID NO:41, or they encode a variable heavy chain comprising the amino acid sequence of SEQ ID NO:23 and a variable light chain comprising the amino acid sequence of SEQ ID NO:43, or they encode a variable heavy chain comprising the amino acid sequence of SEQ ID NO:25 and a variable light chain comprising the amino acid sequence of SEQ ID NO:41, or they encode a variable heavy chain comprising the amino acid sequence of SEQ ID NO:27 and a variable light chain comprising the amino acid sequence of SEQ ID NO:41, or they encode a variable heavy chain comprising the amino acid sequence of SEQ ID NO:29 and a variable light chain comprising the amino acid sequence of SEQ ID NO:41, or they encode a variable heavy chain comprising the amino acid sequence of SEQ ID NO:31 and a variable light chain comprising the amino acid sequence of SEQ ID NO:41, or they encode a variable heavy chain comprising the amino acid sequence of SEQ ID NO:33 and a variable light chain comprising the amino acid sequence of SEQ ID NO:45, or they encode a variable heavy chain comprising the amino acid sequence of SEQ ID NO:35 and a variable light chain comprising the amino acid sequence of SEQ ID NO:41, or they encode a variable heavy chain comprising the amino acid sequence of SEQ ID NO:37 and a variable light chain comprising the amino acid sequence of SEQ ID NO:41, or they encode a variable heavy chain comprising the amino acid sequence of SEQ ID NO:39 and a variable light chain comprising the amino acid sequence of SEQ ID NO:45, or they encode a variable heavy chain comprising the amino acid sequence of SEQ ID NO:80 and a variable light chain comprising the amino acid sequence of SEQ ID NO:41, or they encode a variable heavy chain comprising the amino acid sequence of SEQ ID NO:82 and a variable light chain comprising the amino acid sequence of SEQ ID NO:41, or they encode a variable heavy chain comprising the amino acid sequence of SEQ ID NO:84 and a variable light chain comprising the amino acid sequence of SEQ ID NO:88, or they encode a variable heavy chain comprising the amino acid sequence of SEQ ID NO:86 and a variable light chain comprising the amino acid sequence of SEQ ID NO:41, or they encode a variable heavy chain comprising the amino acid sequence of SEQ ID NO:303 and a variable light chain comprising the amino acid sequence of SEQ ID NO:305, or they encode a variable heavy chain comprising the amino acid sequence of SEQ ID NO:307 and a variable light chain comprising the amino acid sequence of SEQ ID NO:309, or they encode a variable heavy chain comprising the amino acid sequence of SEQ ID NO:311 and a variable light chain comprising the amino acid sequence of SEQ ID NO:313, or they encode a variable heavy chain comprising the amino acid sequence of SEQ ID NO:315 and a variable light chain comprising the amino acid sequence of SEQ ID NO:317, or they encode a variable heavy chain comprising the amino acid sequence of SEQ ID NO:319 and a variable light chain comprising the amino acid sequence of SEQ ID NO:321, or they encode a variable heavy chain comprising the amino acid sequence of SEQ ID NO:323 and a variable light chain comprising the amino acid sequence of SEQ ID NO:325, or they encode a variable heavy chain comprising the amino acid sequence of SEQ ID NO:327 and a variable light chain comprising the amino acid sequence of SEQ ID NO:329, or they encode a variable heavy chain comprising the amino acid sequence of SEQ ID NO:331 and a variable light chain comprising the amino acid sequence of SEQ ID NO:333, or they encode a variable heavy chain comprising the amino acid sequence of SEQ ID NO:335 and a variable light chain comprising the amino acid sequence of SEQ ID NO:337, or they encode a variable heavy chain comprising the amino acid sequence of SEQ ID NO:339 and a variable light chain comprising the amino acid sequence of SEQ ID NO:341, or they encode a variable heavy chain comprising the amino acid sequence of SEQ ID NO:343 and a variable light chain comprising the amino acid sequence of SEQ ID NO:345, or they encode a variable heavy chain comprising the amino acid sequence of SEQ ID NO:347 and a variable light chain comprising the amino acid sequence of SEQ ID NO:349, or they encode a variable heavy chain comprising the amino acid sequence of SEQ ID NO:351 and a variable light chain comprising the amino acid sequence of SEQ ID NO:353, or they encode a variable heavy chain comprising the amino acid sequence of SEQ ID NO:355 and a variable light chain comprising the amino acid sequence of SEQ ID NO:357, or they encode a variable heavy chain comprising the amino acid sequence of SEQ ID NO:359 and a variable light chain comprising the amino acid sequence of SEQ ID NO:361, or they encode a variable heavy chain comprising the amino acid sequence of SEQ ID NO:363 and a variable light chain comprising the amino acid sequence of SEQ ID NO:365, or they encode a variable heavy chain comprising the amino acid sequence of SEQ ID NO:367 and a variable light chain comprising the amino acid sequence of SEQ ID NO:369, or they encode a variable heavy chain comprising the amino acid sequence of SEQ ID NO:371 and a variable light chain comprising the amino acid sequence of SEQ ID NO:373, or they encode a variable heavy chain comprising the amino acid sequence of SEQ ID NO:375 and a variable light chain comprising the amino acid sequence of SEQ ID NO:377, or they encode a variable heavy chain comprising the amino acid sequence of SEQ ID NO:379 and a variable light chain comprising the amino acid sequence of SEQ ID NO:381, or they encode a variable heavy chain comprising the amino acid sequence of SEQ ID NO:383 and a variable light chain comprising the amino acid sequence of SEQ ID NO:385, or they encode a variable heavy chain comprising the amino acid sequence of SEQ ID NO:387 and a variable light chain comprising the amino acid sequence of SEQ ID NO:389, or they encode a variable heavy chain comprising the amino acid sequence of SEQ ID NO:391 and a variable light chain comprising the amino acid sequence of SEQ ID NO:393, or they encode a variable heavy chain comprising the amino acid sequence of SEQ ID NO:395 and a variable light chain comprising the amino acid sequence of SEQ ID NO:397, or they encode a variable heavy chain comprising the amino acid sequence of SEQ ID NO:399 and a variable light chain comprising the amino acid sequence of SEQ ID NO:401, or they encode a variable heavy chain comprising the amino acid sequence of SEQ ID NO:403 and a variable light chain comprising the amino acid sequence of SEQ ID NO:405, or they encode a variable heavy chain comprising the amino acid sequence of SEQ ID NO:407 and a variable light chain comprising the amino acid sequence of SEQ ID NO:409, or they encode a variable heavy chain comprising the amino acid sequence of SEQ ID NO:411 and a variable light chain comprising the amino acid sequence of SEQ ID NO:413, or they encode a variable heavy chain comprising the amino acid sequence of SEQ ID NO:415 and a variable light chain comprising the amino acid sequence of SEQ ID NO:417, or they encode a variable heavy chain comprising the amino acid sequence of SEQ ID NO:419 and a variable light chain comprising the amino acid sequence of SEQ ID NO:421, or they encode a variable heavy chain comprising the amino acid sequence of SEQ ID NO:423 and a variable light chain comprising the amino acid sequence of SEQ ID NO:425, or they encode a variable heavy chain comprising the amino acid sequence of SEQ ID NO:427 and a variable light chain comprising the amino acid sequence of SEQ ID NO:429, or they encode a variable heavy chain comprising the amino acid sequence of SEQ ID NO:431 and a variable light chain comprising the amino acid sequence of SEQ ID NO:433, or they encode a variable heavy chain comprising the amino acid sequence of SEQ ID NO:435 and a variable light chain comprising the amino acid sequence of SEQ ID NO:437, or they encode a variable heavy chain comprising the amino acid sequence of SEQ ID NO:439 and a variable light chain comprising the amino acid sequence of SEQ ID NO:441, or they encode a variable heavy chain comprising the amino acid sequence of SEQ ID NO:443 and a variable light chain comprising the amino acid sequence of SEQ ID NO:445, or they encode a variable heavy chain comprising the amino acid sequence of SEQ ID NO:447 and a variable light chain comprising the amino acid sequence of SEQ ID NO:449, or they encode a variable heavy chain comprising the amino acid sequence of SEQ ID NO:451 and a variable light chain comprising the amino acid sequence of SEQ ID NO:453, or they encode a variable heavy chain comprising the amino acid sequence of SEQ ID NO:455 and a variable light chain comprising the amino acid sequence of SEQ ID NO:457, or they encode a variable heavy chain comprising the amino acid sequence of SEQ ID NO:459 and a variable light chain comprising the amino acid sequence of SEQ ID NO:461.

[0085] In a specific embodiment of the invention, the nucleic acid molecules encoding the variable heavy chain of the binding molecules of the invention comprise a nucleotide sequence selected from the group consisting of SEQ ID NO:14, SEQ ID NO:16, SEQ ID NO:18, SEQ ID NO:20, SEQ ID NO:22, SEQ ID NO:24, SEQ ID NO:26, SEQ ID NO:28, SEQ ID NO:30, SEQ ID NO:32, SEQ ID NO:34, SEQ ID NO:36, SEQ ID NO:38, SEQ ID NO:79, SEQ ID NO:81, SEQ ID NO:83, SEQ ID NO:85, SEQ ID NO:302, SEQ ID NO:306, SEQ ID NO:310, SEQ ID NO:314, SEQ ID NO:318, SEQ ID NO:322, SEQ ID NO:326, SEQ ID NO:330, SEQ ID NO:334, SEQ ID NO:338, SEQ ID NO:342, SEQ ID NO:346, SEQ ID NO:350, SEQ ID NO:354, SEQ ID NO:358, SEQ ID NO:362, SEQ ID NO:366, SEQ ID NO:370, SEQ ID NO:374, SEQ ID NO:378, SEQ ID NO:382, SEQ ID NO:386, SEQ ID NO:390, SEQ ID NO:394, SEQ ID NO:398, SEQ ID NO:402, SEQ ID NO:406, SEQ ID NO:410, SEQ ID NO:414, SEQ ID NO:418, SEQ ID NO:422, SEQ ID NO:426, SEQ ID NO:430, SEQ ID NO:434, SEQ ID NO:438, SEQ ID NO:442, SEQ ID NO:446, SEQ ID NO:450, SEQ ID NO:454 and SEQ ID NO:458.

[0086] In yet another specific embodiment of the present invention, the nucleic acid molecules encoding the variable light chain of the binding molecules of the invention comprise a nucleotide sequence selected of the group consisting of SEQ ID NO:40, SEQ ID NO:42, SEQ ID NO:44, SEQ ID NO:87, SEQ ID NO:304, SEQ ID NO:308, SEQ ID NO:312, SEQ ID NO:316, SEQ ID NO:320, SEQ ID NO:324, SEQ ID NO:328, SEQ ID NO:332, SEQ ID NO:336, SEQ ID NO:340, SEQ ID NO:344, SEQ ID NO:348, SEQ ID NO:352, SEQ ID NO:356, SEQ ID NO:360, SEQ ID NO:364, SEQ ID NO:368, SEQ ID NO:372, SEQ ID NO:376, SEQ ID NO:380, SEQ ID NO:384, SEQ ID NO:388, SEQ ID NO:392, SEQ ID NO:396, SEQ ID NO:400, SEQ ID NO:404, SEQ ID NO:408, SEQ ID NO:412, SEQ ID NO:416, SEQ ID NO:420, SEQ ID NO:424, SEQ ID NO:428, SEQ ID NO:432, SEQ ID NO:436, SEQ ID NO:440, SEQ ID NO:444, SEQ ID NO:448, SEQ ID NO:452, SEQ ID NO:456 and SEQ ID NO:460.

[0087] It is another aspect of the invention to provide vectors, i.e., nucleic acid constructs, comprising one or more nucleic acid molecules according to the present invention. Vectors can be derived from plasmids such as inter alia F, R1, RP1, Col, pBR322, TOL, Ti, etc; cosmids; phages such as lambda, lambdoid, M13, Mu, P1, P22, Q_{β}, T-even, T-odd, T2, T4, T7, etc; plant viruses such as inter alia alfalfa mosaic virus, bromovirus, capillovirus, carlavirus, carmovirus, caulivirus, clostervirus, comovirus, cryptovirus, cucumovirus, dianthovirus, fabavirus, fijivirus, furovirus, geminivirus, hordeivirus, ilarvirus, luteovirus, machlovirus, marafivirus, necrovirus, nepovirus, phytorepvirus, plant rhabdovirus, potexvirus, potyvirus, sobemovirus, tenuivirus, tobamovirus, tobravirus, tomato spotted wilt virus, tombusvirus, tymovirus, etc.; or animal viruses such as inter alia adenovirus, arenaviridae, baculoviridae, bimaviridae, bunyaviridae, calciviridae, cardioviruses, coronaviridae, corticoviridae, cystoviridae, Epstein-Barr virus, enteroviruses, filoviridae, flaviviridae, Foot-and-Mouth disease virus, hepadnaviridae, hepatitis viruses, herpesviridae, immunodeficiency viruses, influenza virus, inoviridae, iridoviridae, orthomyxoviridae, papovaviruses, paramyxoviridae, parvoviridae, picornaviridae, poliovirus, polydnaviridae, poxyiridae, reoviridae, retroviruses, rhabdoviridae, rhinoviruses, Semliki Forest virus, tetraviridae, togaviridae, toroviridae, vaccinia virus, vescular stomatitis virus, etc. Vectors can be used for cloning and/or for expression of the binding molecules of the invention and might even be used for gene therapy purposes. Vectors comprising one or more nucleic acid molecules according to the invention operably linked to one or more expression-regulating nucleic acid molecules are also covered by the present invention. The choice of the vector is dependent on the recombinant procedures followed and the host used. Introduction of vectors in host cells can be effected by inter alia calcium phosphate transfection, virus infection, DEAE-dextran mediated transfection, lipofectamin transfection or electroporation. Vectors may be autonomously replicating or may replicate together with the chromosome into which they have been integrated. Preferably, the vectors contain one or more selection markers. The choice of the markers may depend on the host cells of choice, although this is not critical to the invention as is well known to persons skilled in the art. They include, but are not limited to, kanamycin, neomycin, puromycin, hygromycin, zeocin, thymidine kinase gene from Herpes simplex virus (HSV-TK), dihydrofolate reductase gene from mouse (dhfr). Vectors comprising one or more nucleic acid molecules encoding the binding molecules as described above operably linked to one or more nucleic acid molecules encoding proteins or peptides that can be used to isolate the binding molecules are also covered by the invention. These proteins or peptides include, but are not limited to, glutathione-S-transferase, maltose binding protein, metal-binding polyhistidine, green fluorescent protein, luciferase and beta-galactosidase.

[0088] Hosts containing one or more copies of the vectors mentioned above are an additional subject of the present invention. Preferably, the hosts are host cells. Host cells include, but are not limited to, cells of mammalian, plant, insect, fungal or bacterial origin. Bacterial cells include, but are not limited to, cells from Gram positive bacteria such as several species of the genera Bacillus, Streptomyces and Staphylococcus or cells of Gram negative bacteria such as several species of the genera Escherichia, such as E. coli, and Pseudomonas. In the group of fungal cells preferably yeast cells are used. Expression in yeast can be achieved by using yeast strains such as inter alia Pichia pastoris, Saccharomyces cerevisiae and Hansenula polymorpha. Furthermore, insect cells such as cells from Drosophila and Sf9 can be used as host cells. Besides that, the host cells can be plant cells such as inter alia cells from crop plants such as forestry plants, or cells from plants providing food and raw materials such as cereal plants, or medicinal plants, or cells from ornamentals, or cells from flower bulb crops. Transformed (transgenic) plants or plant cells are produced by known methods, for example, Agrobacterium-mediated gene transfer, transformation of leaf discs, protoplast transformation by polyethylene glycol-induced DNA transfer, electroporation, sonication, microinjection or bolistic gene transfer. Additionally, a suitable expression system can be a baculovirus system. Expression systems using mammalian cells such as Chinese Hamster Ovary (CHO) cells, COS cells, BHK cells or Bowes melanoma cells are preferred in the present invention. Mammalian cells provide expressed proteins with posttranslational modifications that are most similar to natural molecules of mammalian origin. Since the present invention deals with molecules that may have to be administered to humans, a completely human expression system would be particularly preferred. Therefore, even more preferably, the host cells are human cells. Examples of human cells are inter alia HeLa, 911, AT1080, A549, 293 and HEK293T cells. Preferred mammalian cells are human retina cells such as 911 cells or the cell line deposited at the European Collection of Cell Cultures (ECACC), CAMRu, Salisbury, Wiltshire SP4 OJG, Great Britain on 29 Feb. 1996 under number 96022940 and marketed under the trademark PER.C6® (PER.C6 is a registered trademark of Crucell Holland B.V.). For the purposes of this application “PER.C6” refers to cells deposited under number 96022940 or ancestors, passages up-stream or downstream as well as descendants from ancestors of deposited cells, as well as derivatives of any of the foregoing.

[0089] In preferred embodiments, the human producer cells comprise at least a functional part of a nucleic acid sequence encoding an adenovirus E1 region in expressible format. In even more preferred embodiments, the host cells are derived from a human retina and immortalized with nucleic acids comprising adenoviral E1 sequences, such as the cell line deposited at the European Collection of Cell Cultures (ECACC), CAMR, Salisbury, Wiltshire SP4 OJG, Great Britain on 29 Feb. 1996 under number 96022940 and marketed under the trademark PER.C6™, and derivatives thereof. Production of recombinant proteins in host cells can be performed according to methods well known in the art. The use of the cells marketed under the trademark PER.C6™ as a production platform for proteins of interest has been described in WO 00/63403 the disclosure of which is incorporated herein by reference in its entirety.

[0090] A method of producing a binding molecule or a functional variant according to the invention is an additional part of the invention. The method comprises the steps of a) culturing a host according to the invention under conditions conducive to the expression of the binding molecule or functional variant, and b) optionally, recovering the expressed binding molecule or functional variant. The expressed binding molecules or functional variants thereof can be recovered from the cell free extract, but preferably they are recovered from the culture medium. Methods to recover proteins, such as binding molecules, from cell free extracts or culture medium are well known to the man skilled in the art. Binding molecules or functional variants thereof as obtainable by the above-described method are also a part of the present invention.

[0091] Alternatively, next to the expression in hosts, such as host cells, the binding molecules or functional variants thereof of the invention can be produced synthetically by conventional peptide synthesizers or in cell-free translation systems using RNA nucleic acid derived from DNA molecules according to the invention. Binding molecule or functional variants thereof as obtainable by the above-described synthetic production methods or cell-free translation systems are also a part of the present invention.

[0092] In yet another embodiment, human binding molecules of the present invention can also be produced in transgenic, non-human, mammals such as inter alia rabbits, goats or cows, and secreted into for instance the milk thereof.

[0093] In yet another alternative embodiment, binding molecules according to the present invention, preferably human binding molecules specifically binding to SARS-CoV or a fragment thereof, may be generated by transgenic non-human mammals, such as for instance transgenic mice or rabbits, that express human immunoglobulin genes. Preferably, the transgenic non-human mammals have a genome comprising a human heavy chain transgene and a human light chain transgene encoding all or a portion of the human binding molecules as described above. The transgenic non-human mammals can be immunized with a purified or enriched preparation of SARS-CoV or a fragment thereof. Protocols for immunizing non-human mammals are well established in the art. See Using Antibodies: A Laboratory Manual, Edited by: E. Harlow, D. Lane (1998), Cold Spring Harbor Laboratory, Cold Spring Harbor, N.Y. and Current Protocols in Immunology, Edited by: J. E. Coligan, A. M. Kruisbeek, D. H. Margulies, E. M. Shevach, W. Strober (2001), John Wiley & Sons Inc., New York, the disclosures of which are incorporated herein by reference. Immunization protocols often include multiple immunizations, either with or without adjuvants such as Freund's complete adjuvant and Freund's incomplete adjuvant, but may also include naked DNA immunizations. In another embodiment, the human binding molecules are produced by B cells or plasma cells derived from the transgenic animals. In yet another embodiment, the human binding molecules are produced by hybridomas which are prepared by fusion of B cells obtained from the above-described transgenic non-human mammals to immortalized cells. B cells, plasma cells and hybridomas as obtainable from the above-described transgenic non-human mammals and human binding molecules as obtainable from the above-described transgenic non-human mammals, B cells, plasma cells and hybridomas are also a part of the present invention.

[0094] In a further aspect, the invention provides a method of identifying binding molecules, preferably human binding molecules such as human monoclonal antibodies or fragments thereof, according to the invention, or nucleic acid molecules according to the invention, and comprises the steps of a) contacting a phage library of binding molecules, preferably human binding molecules, with SARS-CoV or a fragment thereof, b) selecting at least once for a phage binding to the SARS-CoV or the fragment thereof, and c) separating and recovering the phage binding to the SARS-CoV or the fragment thereof. The selection step according to the present invention is preferably performed in the presence of SARS-CoV which is inactivated. The SARS-CoV may be isolated or non-isolated, e.g., present in serum and/or blood of an infected individual. Alternatively, the selection step may be performed in the presence of a fragment of SARS-CoV such as an extracellular part of the SARS-CoV, one or more proteins or (poly)peptides derived from SARS-CoV, fusion proteins comprising these proteins or (poly)peptides, and the like. Phage display methods for identifying and obtaining binding molecules, e.g., antibodies, are by now well-established methods known by the person skilled in the art. They are e.g., described in U.S. Pat. No. 5,696,108; Burton and Barbas, 1994; de Kruif et al., 1995b; and Phage Display: A Laboratory Manual. Edited by: C. F. Barbas, D. R. Burton, J. K. Scott and G. J. Silverman (2001), Cold Spring Harbor Laboratory Press, Cold Spring Harbor, N.Y. All these references are herewith incorporated herein in their entirety. For the construction of phage display libraries, collections of human monoclonal antibody heavy and light chain variable region genes are expressed on the surface of bacteriophage, preferably filamentous bacteriophage, particles, in, for example, single-chain Fv (scFv) or in Fab format (see de Kruif et al., 1995b). Large libraries of antibody fragment-expressing phages typically contain more than 1.0*10⁹ antibody specificities and may be assembled from the immunoglobulin V regions expressed in the B lymphocytes of immunized- or non-immunized individuals. In a specific embodiment of the invention, the phage library of binding molecules, preferably scFv phage library, is prepared from RNA isolated from cells obtained from a subject that has been vaccinated or exposed to a SARS-CoV. RNA can be isolated from inter alia bone marrow or peripheral blood, preferably peripheral blood lymphocytes. The subject can be an animal vaccinated or exposed to SARS-CoV, but is preferably a human subject which has been vaccinated or has been exposed to SARS-CoV. Preferably the human subject has recovered from SARS-CoV.

[0095] Alternatively, phage display libraries may be constructed from immunoglobulin variable regions that have been partially assembled in vitro to introduce additional antibody diversity in the library (semi-synthetic libraries). For example, in vitro assembled variable regions contain stretches of synthetically produced, randomized or partially randomized DNA in those regions of the molecules that are important for antibody specificity, e.g., CDR regions. SARS-CoV specific phage antibodies can be selected from the library by immobilizing target antigens such as antigens from SARS-CoV on a solid phase and subsequently exposing the target antigens to a phage library to allow binding of phages expressing antibody fragments specific for the solid phase-bound antigen(s). Non-bound phages are removed by washing and bound phages eluted from the solid phase for infection of Escherichia coli (E. coli) bacteria and subsequent propagation. Multiple rounds of selection and propagation are usually required to sufficiently enrich for phages binding specifically to the target antigen(s). If desired, before exposing the phage library to target antigens the phage library can first be subtracted by exposing the phage library to non-target antigens bound to a solid phase. Phages may also be selected for binding to complex antigens such as complex mixtures of SARS-CoV proteins or (poly)peptides, host cells expressing one or more proteins or (poly)peptides of SARS-CoV, or SARS-CoV itself. Antigen specific phage antibodies can be selected from the library by incubating a solid phase with bound thereon a preparation of inactivated SARS-CoV with the phage antibody library to let, for example, the scFv or Fab part of the phage bind to the proteins/polypeptides of the SARS-CoV preparation. After incubation and several washes to remove unbound and loosely attached phages, the phages that have bound with their scFv or Fab part to the preparation are eluted and used to infect Escherichia coli to allow amplification of the new specificity. Generally, one or more selection rounds are required to separate the phages of interest from the large excess of non-binding phages. Alternatively, known proteins or (poly)peptides of the SARS-CoV can be expressed in host cells and these cells can be used for selection of phage antibodies specific for the proteins or (poly)peptides. A phage display method using these host cells can be extended and improved by subtracting non-relevant binders during screening by addition of an excess of host cells comprising no target molecules or non-target molecules that are similar, but not identical, to the target, and thereby strongly enhance the chance of finding relevant binding molecules. (This process is referred to as the Mabstract™ process. Mabstract™ is a pending trademark application of Crucell Holland B.V., see also U.S. Pat. No. 6,265,150 which is incorporated herein by reference.)

[0096] In yet a further aspect, the invention provides a method of obtaining a binding molecule, preferably a human binding molecule or a nucleic acid molecule according to the invention, wherein the method comprises the steps of a) performing the above-described method of identifying binding molecules, preferably human binding molecules such as human monoclonal antibodies or fragments thereof according to the invention, or nucleic acid molecules according to the invention, and b) isolating from the recovered phage the human binding molecule and/or the nucleic acid encoding the human binding molecule. Once a new monoclonal phage antibody has been established or identified with the above mentioned method of identifying binding molecules or nucleic acid molecules encoding the binding molecules, the DNA encoding the scFv or Fab can be isolated from the bacteria or phages and combined with standard molecular biological techniques to make constructs encoding bivalent scFvs or complete human immunoglobulins of a desired specificity (e.g., IgG, IgA or IgM). These constructs can be transfected into suitable cell lines and complete human monoclonal antibodies can be produced (see Huls et al., 1999; Boel et al., 2000).

[0097] In a further aspect, the invention is directed to a phage library of binding molecules, preferably a scFv phage display library which is prepared from RNA isolated from cells obtained from a subject that has been vaccinated or exposed to a SARS-CoV. RNA can be isolated from inter alia bone marrow or peripheral blood, preferably peripheral blood lymphocytes. The subject can be an animal vaccinated or exposed to SARS-CoV, but is preferably a human subject which has been vaccinated or has been exposed to SARS-CoV. Preferably the human subject has recovered from SARS-CoV.

[0098] In yet a further aspect, the invention provides compositions comprising at least one binding molecule, at least one functional variant or fragment thereof, at least one immunoconjugate according to the invention or a combination thereof. In addition to that, the compositions may comprise inter alia stabilizing molecules, such as albumin or polyethylene glycol, or salts. Preferably, the salts used are salts that retain the desired biological activity of the binding molecules and do not impart any undesired toxicological effects. Examples of such salts include, but are not limited to, acid addition salts and base addition salts. Acid addition salts include, but are not limited to, those derived from nontoxic inorganic acids, such as hydrochloric, nitric, phosphoric, sulfuric, hydrobromic, hydroiodic, phosphorous and the like, as well as from nontoxic organic acids such as aliphatic mono- and dicarboxylic acids, phenyl-substituted alkanoic acids, hydroxy alkanoic acids, aromatic acids, aliphatic and aromatic sulfonic acids and the like. Base addition salts include, but are not limited to, those derived from alkaline earth metals, such as sodium, potassium, magnesium, calcium and the like, as well as from nontoxic organic amines, such as N,N′-dibenzylethylenediamine, N-methylglucamine, chloroprocaine, choline, diethanolamine, ethylenediamine, procaine and the like. If necessary, the binding molecules of the invention may be coated in or on a material to protect them from the action of acids or other natural or non-natural conditions that may inactivate the binding molecules.

[0099] In yet a further aspect, the invention provides compositions comprising at least one nucleic acid molecule as defined in the present invention. The compositions may comprise aqueous solutions such as aqueous solutions containing salts (e.g., NaCl or salts as described above), detergents (e.g., SDS) and/or other suitable components.

[0100] Furthermore, the present invention pertains to pharmaceutical compositions comprising at least one binding molecule according to the invention, at least one functional variant or fragment thereof, at least one immunoconjugate according to the invention, at least one composition according to the invention, or combinations thereof. The pharmaceutical composition of the invention further comprises at least one pharmaceutically acceptable excipient.

[0101] A pharmaceutical composition according to the invention can further comprise at least one other therapeutic, prophylactic and/or diagnostic agent. Preferably, the pharmaceutical composition comprises at least one other prophylactic and/or therapeutic agent. Preferably, the further therapeutic and/or prophylactic agents are agents capable of preventing and/or treating an infection and/or a condition resulting from SARS-CoV. Therapeutic and/or prophylactic agents include, but are not limited to, anti-viral agents. Such agents can be binding molecules, small molecules, organic or inorganic compounds, enzymes, polynucleotide sequences etc.

[0102] Examples of anti-viral agents include, but are not limited to, abacavir, acyclovir, adefovir, afovirsen, amantadine, amprenavir, AZT, camptothecins, castanospermine, cidofovir, D4T, ddC, ddI, d4T, delavirdine, didanosine, efavirenz, famciclovir, fialuridine, foscarnet, FTC, ganciclovir, GG167, idoxuridine, indinavir, interferon alpha, lamivudine, lobucavir, loviride, nelfinavir, nevirapine, oseltamivir, penciclovir, pirodavir, ribavirin, rimantadine, ritonavir, saquinavir, sICAM-1, sorivudine, stavudine, trifluridine, 3TC, valacyclovir, vidarabine, zalcitabine, zanamivir, zidovudine, and pharmaceutically acceptable salts, acids or derivatives of any of the above. Other agents that are currently used to treat patients infected with SARS-CoV are interferon-alpha, steroids and potential replicase inhibitors. Furthermore, patients infected with SARS-CoV are currently treated by transfusion of serum produced from blood donated by recovering/recovered SARS patients who have produced antibodies after being exposed to the virus. Agents capable of preventing and/or treating an infection with SARS-CoV and/or a condition resulting from SARS-CoV that are in the experimental phase might also be used as other therapeutic and/or prophylactic agents useful in the present invention.

[0103] The binding molecules of the invention or pharmaceutical compositions of the invention can be tested in suitable animal model systems prior to use in humans. Such animal model systems include, but are not limited to, mice, rats, chicken, cows, monkeys, pigs, dogs, rabbits, etc. Any animal system well-known in the art may be used.

[0104] Typically, pharmaceutical compositions must be sterile and stable under the conditions of manufacture and storage. The binding molecules, variant or fragments thereof, immunoconjugates, nucleic acid molecules or compositions of the present invention can be in powder form for reconstitution in the appropriate pharmaceutically acceptable excipient before or at the time of delivery. In the case of sterile powders for the preparation of sterile injectable solutions, the preferred methods of preparation are vacuum drying and freeze-drying (lyophilization) that yield a powder of the active ingredient plus any additional desired ingredient from a previously sterile-filtered solution thereof.

[0105] Alternatively, the binding molecules, variant or fragments thereof, immunoconjugates, nucleic acid molecules or compositions of the present invention can be in solution and the appropriate pharmaceutically acceptable excipient can be added and/or mixed before or at the time of delivery to provide a unit dosage injectable form. Preferably, the pharmaceutically acceptable excipient used in the present invention is suitable to high drug concentration, can maintain proper fluidity and, if necessary, can delay absorption.

[0106] The choice of the optimal route of administration of the pharmaceutical compositions will be influenced by several factors including the physico-chemical properties of the active molecules within the compositions, the urgency of the clinical situation and the relationship of the plasma concentrations of the active molecules to the desired therapeutic effect. For instance, if necessary, the binding molecules of the invention can be prepared with carriers that will protect them against rapid release, such as a controlled release formulation, including implants, transdermal patches, and microencapsulated delivery systems. Biodegradable, biocompatible polymers can inter alia be used, such as ethylene vinyl acetate, polyanhydrides, polyglycolic acid, collagen, polyorthoesters, and polylactic acid. Furthermore, it may be necessary to coat the binding molecules with, or co-administer the binding molecules with, a material or compound that prevents the inactivation of the binding molecules. For example, the binding molecules may be administered to a subject in an appropriate carrier, for example, liposomes, or a diluent.

[0107] The routes of administration can be divided into two main categories, oral and parenteral administration. These two categories include, but are not limited to, bolus, buccal, epidermal, epidural, inhalation, intra-abdominal, intra-arterial, intra-articular, intrabronchial, intracapsular, intracardiac, intracartilaginous, intracavitary, intracelial, intracelebellar, intracerebronventricular, intracolic, intracervical, intradermal, intragastric, intrahepatic, intramedullary, intramuscular, intramyocardial, intranasal, intra-ocular intra-orbital, intra-osteal, intrapelvic, intrapericardiac, intraperitoneal, intraplaque, intrapleural, intraprostatic, intrapulmonary, intrarectal, intrarenal, intraretinal, intraspinal, intrasternal, intrasynovial, intrathecal, intrathoracic, intratumoral, intra-uterine, intravenous, intraventricular, intravesical, rectal, spinal, subarachnoid, subcapsular, subcutaneous, subcuticular, sublingual, topical, transdermal, transmucosal, transtracheal, and vaginal administration. The preferred administration route is intravenous, particularly preferred is intramuscular.

[0108] Oral dosage forms can be formulated inter alia as tablets, troches, lozenges, aqueous or oily suspensions, dispersible powders or granules, emulsions, hard capsules, soft gelatin capsules, syrups or elixirs, pills, dragees, liquids, gels, or slurries. These formulations can contain pharmaceutically excipients including, but not limited to, inert diluents such as calcium carbonate, sodium carbonate, lactose, calcium phosphate or sodium phosphate; granulating and disintegrating agents such as corn starch or alginic acid; binding agents such as starch, gelatin or acacia; lubricating agents such as calcium stearate, glyceryl behenate, hydrogenated vegetable oils, magnesium stearate, mineral oil, polyethylene glycol, sodium stearyl, fumarate, stearic acid, talc, zinc stearate; preservatives such as n-propyl-p-hydroxybenzoate; coloring, flavoring or sweetening agents such as sucrose, saccharine, glycerol, propylene glycol or sorbitol; vegetable oils such as arachis oil, olive oil, sesame oil or coconut oil; mineral oils such as liquid paraffin; wetting agents such as benzalkonium chloride, docusate sodium, lecithin, poloxamer, sodium lauryl sulfate, sorbitan esters; and thickening agents such as agar, alginic acid, beeswax, carboxymethyl cellulose calcium, carageenan, dextrin or gelatin.

[0109] The pharmaceutical compositions of the present invention can also be formulated for parenteral administration. Formulations for parenteral administration can be inter alia in the form of aqueous or non-aqueous isotonic sterile non-toxic injection or infusion solutions or suspensions. Preferred parenteral administration routes include intravenous, intraperitoneal, epidural, intramuscular and intratumoral injection or infusion. The solutions or suspensions may comprise agents that are non-toxic to recipients at the dosages and concentrations employed such as 1,3-butanediol, Ringer's solution, Hank's solution, isotonic sodium chloride solution, oils such as synthetic mono- or diglycerides or fatty acids such as oleic acid, local anesthetic agents, preservatives, buffers, viscosity or solubility increasing agents, water-soluble antioxidants such as ascorbic acid, cysteine hydrochloride, sodium bisulfate, sodium metabisulfite, sodium sulfite and the like, oil-soluble antioxidants such as ascorbyl palmitate, butylated hydroxyanisole (BHA), butylated hydroxytoluene (BHT), lecithin, propyl gallate, alpha-tocopherol, and the like, and metal chelating agents, such as citric acid, ethylenediamine tetraacetic acid (EDTA), sorbitol, tartaric acid, phosphoric acid, and the like.

[0110] In a further aspect, the binding molecules, functional variants, immunoconjugates, compositions, or pharmaceutical compositions of the invention can be used as a medicament. So, a method of treatment and/or prevention of a SARS-CoV infection using the binding molecules, functional variants, immunoconjugates, compositions, or pharmaceutical compositions of the invention is another part of the present invention. The above-mentioned molecules can inter alia be used in the diagnosis, prophylaxis, treatment, or combination thereof, of one or more conditions resulting from SARS-CoV. They are suitable for treatment of yet untreated patients suffering from a condition resulting from SARS-CoV and patients who have been or are treated from a condition resulting from SARS-CoV. They protect against further infection by SARS-CoV and/or will retard the onset or progress of the symptoms associated with SARS. They may even be used in the prophylaxis of SARS in for instance people exposed to the SARS-CoV such as hospital personnel taking care of suspected SARS patients.

[0111] The above-mentioned molecules or compositions may be employed in conjunction with other molecules useful in diagnosis, prophylaxis and/or treatment. They can be used in vitro, ex vivo or in vivo. For instance, the binding molecules, functional variants, immunoconjugates or pharmaceutical compositions of the invention can be co-administered with a vaccine against SARS-CoV. Alternatively, the vaccine may also be administered before or after administration of the molecules of the invention. Administration of the molecules of the invention with a vaccine might be suitable for post-exposure prophylaxis and might also decrease possible side effects of a live-attenuated vaccine in immunocompromised recipients.

[0112] The molecules are typically formulated in the compositions and pharmaceutical compositions of the invention in a therapeutically or diagnostically effective amount. Dosage regimens can be adjusted to provide the optimum desired response (e.g., a therapeutic response). A suitable dosage range may for instance be 0.1-100 mg/kg body weight, preferably 0.5-15 mg/kg body weight. Furthermore, for example, a single bolus may be administered, several divided doses may be administered over time or the dose may be proportionally reduced or increased as indicated by the exigencies of the therapeutic situation. The molecules and compositions according to the present invention are preferably sterile. Methods to render these molecules and compositions sterile are well known in the art. The other molecules useful in diagnosis, prophylaxis and/or treatment can be administered in a similar dosage regimen as proposed for the binding molecules of the invention. If the other molecules are administered separately, they may be administered to a patient prior to (e.g., 2 minutes, 5 minutes, 10 minutes, 15 minutes, 30 minutes, 45 minutes, 60 minutes, 2 hours, 4 hours, 6 hours, 8 hours, 10 hours, 12 hours, 14 hours, 16 hours, 18 hours, 20 hours, 22 hours, 24 hours, 2 days, 3 days, 4 days, 5 days, 7 days, 2 weeks, 4 weeks or 6 weeks before), concomitantly with, or subsequent to (e.g., 2 minutes, 5 minutes, 10 minutes, 15 minutes, 30 minutes, 45 minutes, 60 minutes, 2 hours, 4 hours, 6 hours, 8 hours, 10 hours, 12 hours, 14 hours, 16 hours, 18 hours, 20 hours, 22 hours, 24 hours, 2 days, 3 days, 4 days, 5 days, 7 days, 2 weeks, 4 weeks or 6 weeks after) the administration of one or more of the binding molecules or pharmaceutical compositions of the invention. The exact dosing regimen is usually sorted out during clinical trials in human patients.

[0113] Human binding molecules and pharmaceutical compositions comprising the human binding molecules are particularly useful, and often preferred, when to be administered to human beings as in vivo therapeutic agents, since recipient immune response to the administered antibody will often be substantially less than that occasioned by administration of a monoclonal murine, chimeric or humanized binding molecule.

[0114] In another aspect, the invention concerns the use of binding molecules, preferably human binding molecules, functional variants thereof, immunoconjugates according to the invention, nucleic acid molecules according to the invention, compositions or pharmaceutical compositions according to the invention in the preparation of a medicament for the diagnosis, prophylaxis, treatment, or combination thereof, of a condition resulting from SARS-CoV.

[0115] Next to that, kits comprising at least one binding molecule, preferably human binding molecule, according to the invention, at least one functional variant thereof according to the invention, at least one immunoconjugate according to the invention, at least one nucleic acid molecule according to the invention, at least one composition according to the invention, at least one pharmaceutical composition according to the invention, at least one vector according to the invention, at least one host according to the invention or a combination thereof are also a part of the present invention. Optionally, the above-described components of the kits of the invention are packed in suitable containers and labeled for diagnosis, prophylaxis and/or treatment of the indicated conditions. The above-mentioned components may be stored in unit or multi-dose containers, for example, sealed ampules, vials, bottles, syringes, and test tubes, as an aqueous, preferably sterile, solution or as a lyophilized, preferably sterile, formulation for reconstitution. The containers may be formed from a variety of materials such as glass or plastic and may have a sterile access port (for example, the container may be an intravenous solution bag or a vial having a stopper pierceable by a hypodermic injection needle). The kit may further comprise more containers comprising a pharmaceutically acceptable buffer, such as phosphate-buffered saline, Ringer's solution and dextrose solution. It may further include other materials desirable from a commercial and user standpoint, including other buffers, diluents, filters, needles, syringes, culture medium for one or more of the suitable hosts. Associated with the kits can be instructions customarily included in commercial packages of therapeutic, prophylactic or diagnostic products, that contain information about, for example, the indications, usage, dosage, manufacture, administration, contraindications and/or warnings concerning the use of such therapeutic, prophylactic or diagnostic products.

[0116] The invention further pertains to a method of detecting a SARS-CoV in a sample, wherein the method comprises the steps of a) contacting a sample with a diagnostically effective amount of a binding molecule, a functional variant or an immunoconjugate according to the invention, and b) determining whether the binding molecule, functional variant, or immunoconjugate specifically binds to a molecule of the sample. The sample may be a biological sample including, but not limited to blood, serum, urine, tissue or other biological material from (potentially) infected subjects, or a nonbiological sample such as water, drink, etc. The (potentially) infected subjects may be human subjects, but also animals that are suspected as carriers of SARS-CoV might be tested for the presence of SARS-CoV using the binding molecules, functional variants or immunoconjugates of the invention. The sample may first be manipulated to make it more suitable for the method of detection. Manipulation mean inter alia treating the sample suspected to contain and/or containing SARS-CoV in such a way that the SARS-CoV will disintegrate into antigenic components such as proteins, (poly)peptides or other antigenic fragments. Preferably, the binding molecules, functional variants or immunoconjugates of the invention are contacted with the sample under conditions which allow the formation of an immunological complex between the binding molecules and SARS-CoV or antigenic components thereof that may be present in the sample. The formation of an immunological complex, if any, indicating the presence of SARS-CoV in the sample, is then detected and measured by suitable means. Such methods include, inter alia, homogeneous and heterogeneous binding immunoassays, such as radioimmunoassays (RIA), ELISA, immunofluorescence, immunohistochemistry, FACS, BIACORE and Western blot analyses.

[0117] Preferred assay techniques, especially for large-scale clinical screening of patient sera and blood and blood-derived products are ELISA and Western blot techniques. ELISA tests are particularly preferred. For use as reagents in these assays, the binding molecules, functional variants or immunoconjugates of the invention are conveniently bonded to the inside surface of microtiter wells. The binding molecules, functional variants or immunoconjugates of the invention may be directly bonded to the microtiter well. However, maximum binding of the binding molecules, functional variants or immunoconjugates of the invention to the wells might be accomplished by pretreating the wells with polylysine prior to the addition of the binding molecules, functional variants or immunoconjugates of the invention. Furthermore, the novel the binding molecules, functional variants or immunoconjugates of the invention may be covalently attached by known means to the wells. Generally, the binding molecules, functional variants or immunoconjugates of the invention are used in a concentration of between 0.01 to 100 μg/ml for coating, although higher as well as lower amounts may also be used. Samples are then added to the wells coated with the binding molecules, functional variants or immunoconjugates of the invention.

[0118] Furthermore, the binding molecules or functional variants of the invention can be used to identify epitopes of SARS-CoV. The epitopes can be linear, but also structural and/or conformational. In one embodiment, binding of binding molecules or functional variants of the invention to a series of overlapping peptides, such as 15-mer peptides, of a protein from SARS-CoV can be analyzed by means of PEPSCAN analysis (see inter alia WO 84/03564, WO 93/09872, Slootstra et al. 1996). The binding of binding molecules to each peptide can be tested in a PEPSCAN-based enzyme-linked immuno assay (ELISA). In another embodiment, a random peptide library comprising peptides from SARS-CoV can be screened for peptides capable of binding to the binding molecules or functional variants of the invention. In the above assays the use of neutralizing binding molecules may identify one or more neutralizing epitopes. The peptides/epitopes found can be used as vaccines and for the diagnosis of SARS. In yet a further embodiment, the binding of (neutralizing) binding molecules of the invention to domains of a surface protein of SARS-CoV, such as the spike glycoprotein, may be analyzed. Alternatively, the binding molecules of the invention may identify one or more epitopes of another protein of SARS-CoV including, but not limited to, the membrane protein (M protein), the small envelope protein (E protein) and the nucleocapsid protein (N protein). In a preferred embodiment binding molecule 018 recognized epitopes on the N protein. These epitopes might be useful in the treatment but also in the detection of SARS-CoV.

[0119] In a further aspect, the invention provides a method of screening a binding molecule or a functional variant of a binding molecule for specific binding to the same epitope of a SARS-CoV as the epitope bound by a binding molecule or functional variant of the invention, wherein the method comprises the steps of a) contacting a binding molecule or a functional variant to be screened, a binding molecule or functional variant of the invention and a SARS-CoV or fragment thereof, b) measure if the binding molecule or functional variant to be screened is capable of competing for specifically binding to the SARS-CoV or fragment thereof with the binding molecule or functional variant of the invention. In a further step it may be determined if the screened binding molecules that are capable of competing for specifically binding to the SARS-CoV or fragment thereof have neutralizing activity. A binding molecule or functional variant that is capable of competing for specifically binding to the SARS-CoV or fragment thereof with the binding molecule or functional variant of the invention is another part of the present invention. In the above-described screening method, “specifically binding to the same epitope” also contemplates specific binding to substantially or essentially the same epitope as the epitope bound by the binding molecules of the invention. The capacity to block, or compete with, the binding of the binding molecules of the invention to SARS-CoV typically indicates that a binding molecule to be screened binds to an epitope or binding site on SARS-CoV that structurally overlaps with the binding site on SARS-CoV that is immunospecifically recognized by the binding molecules of the invention. Alternatively, this can indicate that a binding molecule to be screened binds to an epitope or binding site which is sufficiently proximal to the binding site immunospecifically recognized by the binding molecules of the invention to sterically or otherwise inhibit binding of the binding molecules of the invention to SARS-CoV.

[0120] In general, competitive inhibition is measured by means of an assay, wherein an antigen composition, i.e., a composition comprising SARS-CoV or fragments thereof, is admixed with reference binding molecules, i.e., the binding molecules of the invention, and binding molecules to be screened. Usually, the binding molecules to be screened are present in excess. Protocols based upon ELISAs and Western blotting are suitable for use in such simple competition studies. In certain embodiments, one may pre-mix the reference binding molecules with varying amounts of the binding molecules to be screened (e.g., 1:10, 1:20, 1:30, 1:40, 1:50, 1:60, 1:70, 1:80, 1:90 or 1:100) for a period of time prior to applying to the antigen composition. In other embodiments, the reference binding molecules and varying amounts of binding molecules to be screened can simply be admixed during exposure to the antigen composition. In any event, by using species or isotype secondary antibodies one will be able to detect only the bound reference binding molecules, the binding of which will be reduced by the presence of a binding molecule to be screened that recognizes substantially the same epitope. In conducting a binding molecule competition study between a reference binding molecule and any binding molecule to be screened (irrespective of species or isotype), one may first label the reference binding molecule with a detectable label, such as, e.g., biotin, an enzymatic, a radioactive or other label to enable subsequent identification. In these cases, one would pre-mix or incubate the labeled reference binding molecules with the binding molecules to be screened at various ratios (e.g., 1:10, 1:20, 1:30, 1:40, 1:50, 1:60, 1:70, 1:80, 1:90 or 1:100) and (optionally after a suitable period of time) then assay the reactivity of the labeled reference binding molecules and compare this with a control value in which no potentially competing binding molecule was included in the incubation. The assay may again be any one of a range of immunological assays based upon antibody hybridization, and the reference binding molecules would be detected by means of detecting their label, e.g., using streptavidin in the case of biotinylated reference binding molecules or by using a chromogenic substrate in connection with an enzymatic label (such as 3,3′5,5′-tetramethylbenzidine (TMB) substrate with peroxidase enzyme) or by simply detecting a radioactive label. A binding molecule to be screened that binds to the same epitope as the reference binding molecule will be able to effectively compete for binding and thus will significantly reduce reference binding molecule binding, as evidenced by a reduction in bound label. The reactivity of the (labeled) reference binding molecule in the absence of a completely irrelevant binding molecule would be the control high value. The control low value would be obtained by incubating the labeled reference binding molecule with unlabelled reference binding molecules of exactly the same type, when competition would occur and reduce binding of the labeled reference binding molecule. In a test assay, a significant reduction in labeled reference binding molecule reactivity in the presence of a binding molecule to be screened is indicative of a binding molecule that recognizes the same epitope, i.e., one that “cross-reacts” with the labeled reference binding molecule.

[0121] Binding molecules identified by these competition assays (“competitive binding molecules” or “cross-reactive binding molecules”) include, but are not limited to, antibodies, antibody fragments and other binding agents that bind to an epitope or binding site bound by the reference binding molecule, i.e., a binding molecule of the invention, as well as antibodies, antibody fragments and other binding agents that bind to an epitope or binding site sufficiently proximal to an epitope bound by the reference binding molecule for competitive binding between the binding molecules to be screened and the reference binding molecule to occur. Preferably, competitive binding molecules of the invention will, when present in excess, inhibit specific binding of a reference binding molecule to a selected target species by at least 10%, preferably by at least 25%, more preferably by at least 50%, and most preferably by at least 75%-90% or even greater. The identification of one or more competitive binding molecules that bind to about, substantially, essentially or at the same epitope as the binding molecules of the invention is a straightforward technical matter. As the identification of competitive binding molecules is determined in comparison to a reference binding molecule, i.e., a binding molecule of the invention, it will be understood that actually determining the epitope to which the reference binding molecule and the competitive binding molecule bind is not in any way required in order to identify a competitive binding molecule that binds to the same or substantially the same epitope as the reference binding molecule.

[0122] In yet a further aspect, the invention relates to a method of identifying a binding molecule, preferably a human binding molecule, potentially having neutralizing activity against SARS-CoV, wherein the method comprises the steps of (a) contacting a collection of binding molecules on the surface of replicable genetic packages with the SARS-CoV under conditions conducive to binding, (b) separating and recovering binding molecules that bind to the SARS-CoV from binding molecules that do not bind, (c) isolating at least one recovered binding molecule, (d) verifying if the binding molecule isolated has neutralizing activity against the SARS-CoV, characterized in that the SARS-CoV in step a is inactivated. The inactivated SARS-CoV may be purified before being inactivated. Purification may be performed by means of well known purification methods suitable for viruses such as for instance centrifugation through a glycerol cushion. The inactivated SARS-CoV in step (a) may be immobilized to a suitable material before use.

[0123] A replicable genetic package as used herein can be prokaryotic or eukaryotic and includes cells, spores, bacteria, viruses, (bacterio)phage and polysomes. A preferred replicable genetic package is a phage. The binding molecules, such as for instance single chain Fvs, are displayed on the replicable genetic package, i.e., they are attached to a group or molecule located at an exterior surface of the replicable genetic package. The replicable genetic package is a screenable unit comprising a binding molecule to be screened linked to a nucleic acid molecule encoding the binding molecule. The nucleic acid molecule should be replicable either in vivo (e.g., as a vector) or in vitro (e.g., by PCR, transcription and translation). In vivo replication can be autonomous (as for a cell), with the assistance of host factors (as for a virus) or with the assistance of both host and helper virus (as for a phagemid). Replicable genetic packages displaying a collection of binding molecules is formed by introducing nucleic acid molecules encoding exogenous binding molecules to be displayed into the genomes of the replicable genetic packages to form fusion proteins with endogenous proteins that are normally expressed from the outer surface of the replicable genetic packages. Expression of the fusion proteins, transport to the outer surface and assembly results in display of exogenous binding molecules from the outer surface of the replicable genetic packages.

[0124] The inactivation of the SARS-CoV may be performed by viral inactivation methods well known to the skilled artisan such as inter alia pasteurization (wet heat), i.e., heat treatment while still in aqueous solution, at 60° C. for ten hours; dry heat treatment, i.e., heat treatment in the lyophilized state, at 80° C. for 72 hours; vapor heat treatment at 60° C. for ten hours and then 80° C. for one hour; treatment with low pH, i.e., pH 4 for six hours to 21 days; treatment with organic solvent/detergent, i.e., addition of organic solvents and detergents (Triton X-100 or Tween-80) to the virus; treatment by means of cold ethanol fractionation; column chromatography; nanofiltration; UV/light irradiation; gamma-irradiation; and addition of iodine. Preferably, the inactivation is performed by gamma- or UV-irradiation. Methods to test if a virus is still infective or partly or completely inactivated are well known to the person skilled in the art.

[0125] In a further aspect, the invention pertains to a binding molecule having neutralizing activity against the SARS-CoV and being obtainable by the identification method as described above. A pharmaceutical composition comprising the binding molecule, the pharmaceutical composition further comprising at least one pharmaceutically acceptable excipient is also an aspect of the present invention. Pharmaceutically acceptable excipients are described above. The pharmaceutical composition according to the invention may further comprise at least one other therapeutic agent. Suitable agents have been described above.

[0126] The invention further relates to the binding molecule or a pharmaceutical composition according to the invention for use as a medicament. They can be used in the diagnosis, prophylaxis, treatment, or combination thereof of a condition resulting from SARS-CoV.

### EXAMPLES

[0127] To illustrate the invention, the following examples are provided. The examples are not intended to limit the scope of the invention in any way.

### Example 1

Selection of Phage Carrying Single-Chain Fv Fragments Specifically Recognizing SARS-CoV

[0128] Antibody fragments were selected using antibody phage display libraries and technology, essentially as described in U.S. Pat. No. 6,265,150 and in WO 98/15833, both of which are incorporated herein in their entirety. All procedures were performed at room temperature unless stated otherwise. An inactivated SARS-CoV preparation (Frankfurt 1 strain) was prepared as follows. Medium from Vero cells which were infected with SARS-CoV strain Frankfurt 1 was harvested as soon as cyotopathic effect (CPE) was observed. Cell debris was removed by centrifugation of the harvested medium for 15 minutes at 3000 rpm. The obtained supernatant was collected, spun again for 15 minutes at 3000 rpm and transferred to a clean tube. Subsequently, ultracentrifuge tubes were filled with 10 ml sterile 25% glycerol in PBS. Twenty ml of the cleared supernatant was gently applied on the glycerol cushion and the tubes were spun for two hours at 20,000 rpm at 4° C. The supernatant was discarded and the virus pellets were resuspended in 1 ml TNE buffer (10 mM Tris-HCl pH 7.4, 1 mM EDTA, 200 mM NaCl) and stored at −80° C. Next, the resuspended virus pellets were gamma-irradiated at 45 kGy on dry ice. Subsequently, they were tested for the absence of infectivity in cell culture. If absence of infectivity was established, the thus obtained inactivated SARS-CoV preparation was used for selection of single-chain phage antibodies specifically binding to SARS-CoV.

[0129] The inactivated virus preparation and heat-inactivated fetal bovine serum (FBS) were coated overnight at 4° C. onto the surface of separate Maxisorp™ plastic tubes (Nunc). The tubes were blocked for two hours in 3 ml PBS containing 2% FBS and 2% fat free milk powder (2% PBS-FM). After two hours, the FBS-coated tube was emptied and washed three times with PBS. To this tube, 500 μl (approximately 10¹³ cfu) of a phage display library expressing single-chain Fv fragments (scFvs) essentially prepared as described by De Kruif et al. (1995a) and references therein (which are incorporated herein in their entirety), 500 μl 4% PBS-FM and 2 ml 2% PBS-FM were added. The tube was sealed and rotated slowly at room temperature for two hours. Subsequently, the obtained blocked phage library (3 ml) was transferred to a SARS-CoV preparation-coated tube that had been washed three times with PBS. Tween-20 was added to a final concentration of 0.05% and binding was allowed to proceed for two hours on a slowly rotating wheel at room temperature or at 37° C. The tube was emptied and washed ten times with PBS containing 0.05% Tween-20, followed by washing ten times with PBS. One ml glycine-HCL (0.05 M, pH 2.2) was added to elute bound phages, and the tube was rotated slowly for ten minutes. For neutralization purposes, the eluted phages were added to 500 μl 1 M Tris-HCl pH 7.4. To this mixture, 5 ml of exponentially growing XL-1 blue bacterial culture was added. The obtained culture was incubated for thirty minutes at 37° C. without shaking. Then, the bacteria were plated on TYE agar plates containing ampicillin, tetracycline and glucose. After overnight incubation of the plates at 37° C., the colonies were scraped from the plates and used to prepare an enriched phage library, essentially as described by De Kruif et al. (1995a) and WO 02/103012 (both are incorporated by reference herein). Briefly, scraped bacteria were used to inoculate 2TY medium containing ampicillin, tetracycline and glucose and grown at a temperature of 37° C. to an OD 600 nm of ˜0.3. CT or VCSM13 helper phages were added and allowed to infect the bacteria after which the medium was changed to 2TY containing ampicillin, tetracycline and kanamycin. Incubation was continued overnight at 30° C. The next day, the bacteria were removed from the 2TY medium by centrifugation after which the phages in the obtained supernatant were precipitated using polyethylene glycol 6000/NaCl. Finally, the phages were dissolved in a small volume of PBS containing 1% BSA, filter-sterilized and used for a next round of selection. The selection/re-infection procedure was performed two or three times. After each round of selection, individual E. coli colonies were used to prepare monoclonal phage antibodies. Essentially, individual colonies were grown to log-phase and infected with VCSM13 helper phages after which phage antibody production was allowed to proceed overnight. Phage antibody containing supernatants were tested in ELISA for binding activity to the SARS-CoV preparation which was coated to 96-well plates. In the above-described selection, the phage antibodies called SC03-001, SC03-002, SC03-003, SC03-004, SC03-005, SC03-006, SC03-007, SC03-008, SC03-009, SC03-0010, SC03-012, SC03-013, SC03-014 and SC03-015 were obtained.

[0130] To overcome selection of previously identified phage antibodies, alternative selections in the presence of scFvs corresponding to the previous selected phage antibodies were performed as follows. ScFvs of the phage antibodies SC03-001, SC03-002, SC03-003, SC03-004, SC03-005, SC03-006, SC03-007, SC03-008, SC03-009, SC03-0010, SC03-012, SC03-013, SC03-014 and SC03-015 were produced as described before in De Kruif et al. (1995b). The buffer of the scFvs was adjusted to 1×PBS. Then the scFvs were mixed with 500 μl (approximately 10¹³ cfu) of a phage display library expressing single-chain Fv fragments essentially prepared as described by De Kruif et al. (1995a) and references therein (which are incorporated herein in their entirety). Next, the obtained mixture was blocked in an FBS-coated tube as described above and subsequently selection was carried out with the obtained blocked mixture essentially as described above for the blocked phage library. In this alternative selection, the phage antibodies called SC03-016, SC03-017 and SC03-018 were obtained.

### Example 2

Validation of the SARS-CoV Specific Single-Chain Phage Antibodies

[0131] Selected single-chain phage antibodies that were obtained in the screens described above, were validated in ELISA for specificity, i.e., binding to the SARS-CoV preparation prepared as described supra. Additionally, the single-chain phage antibodies were also tested for binding to 10% FBS. For this purpose, the SARS-CoV preparation or 10% FBS preparation was coated to Maxisorp™ ELISA plates. After coating, the plates were blocked in 2% PBS-FM. The selected single-chain phage antibodies were incubated in an equal volume of 4% PBS-FM to obtain blocked phage antibodies. The plates were emptied, washed three times with PBS, after which the blocked phage antibodies were added. Incubation was allowed to proceed for one hour, the plates were washed in PBS containing 0.05% Tween-20 and bound phage antibodies were detected (using OD 492 nm measurement) using an anti-M13 antibody conjugated to peroxidase. As a control, the procedure was performed simultaneously using no single-chain phage antibody or control single-chain phage antibody directed against thyroglobulin (SC02-006) (see De Kruif et al. 1995a and 1995b) or control single-chain phage antibody directed against CD46 (SC02-300). Both controls served as a negative control. As shown in Table 1 and FIG. 1, the selected phage antibodies called SC03-001, SC03-002, SC03-003, SC03-005, SC03-006, SC03-007, SC03-008, SC03-009, SC03-0010, SC03-012, SC03-013, SC03-014 and SC03-015 displayed significant binding to the immobilized SARS-CoV preparation, while no binding to FBS was observed.

[0132] As shown in Table 2 and FIG. 2, the selected phage antibody called SC03-018 displayed significant binding to the immobilized SARS-CoV preparation, while no binding to FBS was observed. The selected phage antibody called SC03-016 and SC03-017 displayed binding to the immobilized SARS-CoV preparation compared to binding to FBS, although in a lesser amount than SC03-018.

### Example 3

Characterization of the scFvs Specific for SARS-CoV

[0133] From the selected specific single chain phage antibody (scFv) clones plasmid DNA was obtained and nucleotide sequences were determined according to standard techniques. The nucleotide sequences of the scFvs (including restriction sites for cloning) called SC03-001, SC03-002, SC03-003, SC03-004, SC03-005, SC03-006, SC03-007, SC03-008, SC03-009, SC03-0010, SC03-012, SC03-013, SC03-014 and SC03-015 are shown in SEQ ID NO:46, SEQ ID NO:48, SEQ ID NO:50, SEQ ID NO:89, SEQ ID NO:52, SEQ ID NO:54, SEQ ID NO:56, SEQ ID NO:58, SEQ ID NO:60, SEQ ID NO:62, SEQ ID NO:64, SEQ ID NO:66, SEQ ID NO:68 and SEQ ID NO:70, respectively. The amino acid sequences of the scFvs called SC03-001, SC03-002, SC03-003, SC03-004, SC03-005, SC03-006, SC03-007, SC03-008, SC03-009, SC03-0010, SC03-012, SC03-013, SC03-014 and SC03-015 are shown in SEQ ID NO:47, SEQ ID NO:49, SEQ ID NO:51, SEQ ID NO:90, SEQ ID NO:53, SEQ ID NO:55, SEQ ID NO:57, SEQ ID NO:59, SEQ ID NO:61, SEQ ID NO:63, SEQ ID NO:65, SEQ ID NO:67, SEQ ID NO:69 and SEQ ID NO:71, respectively. Furthermore, the nucleotide sequences of the scFvs (including restriction sites for cloning) called SC03-016, SC03-017 and SC03-018 are shown in SEQ ID NO:91, SEQ ID NO:93 and SEQ ID NO:95, respectively. The amino acid sequences of the scFvs called SC03-016, SC03-017 and SC03-018 are shown in SEQ ID NO:92, SEQ ID NO:94 and SEQ ID NO:96, respectively.

[0134] The VH and VL gene identity (see I. M. Tomlinson, S. C. Williams, O. Ignatovitch, S. J. Corbett., G. Winter, V-BASE Sequence Directory, Cambridge United Kingdom: MRC Centre for Protein Engineering (1997)) and heavy chain CDR3 compositions of the scFvs specifically binding the SARS-CoV preparation are depicted in Table 3.

### Example 4

Production of Human SARS-CoV Specific Bivalent scFvs in Pichia Pastoris

[0135] Methods for the cloning and expression of bivalent scFv fragments in the Pichia pastoris system were based on protocols provided by the supplier (Invitrogen) in “A Manual of Methods for Expression of Recombinant Proteins Using pPICZ and pPICZα in Pichia pastoris (Version F).” The bivalent scFv expression vector pPicZbiFVH (see FIG. 3B) was constructed from the vector pPICZaB (see FIG. 3A) (Invitrogen) following standard molecular biology techniques known to a person skilled in the art. Three modifications were introduced in the pPICZαB (see FIG. 3C):

[0136] 1. A restriction site (NcoI) was introduced by PCR-generated point mutation directly after the KEK2 cleavage site of the signal peptide to facilitate cloning into the vector.

[0137] 2. A second NcoI restriction site was removed by PCR generated point mutation inside the coding region of the sh ble gene.

[0138] 3. A synthetic fragment comprising the hinge region of murine IgG3 and a linker fragment was introduced between the restriction sites NotI and XbaI.

[0139] All modifications were confirmed by sequencing. ScFvs were cloned into pPicZbiFVH from the phage display expression vector by directional cloning using the restriction sites NcoI and NotI. The Pichia pastoris strain SMD1168 kek1:suc1 (ATCC # 204414) was transformed with 5-10 μg of linearized construct cDNA by electroporation according to the manufacturer's protocols (supra). The transformed cells were plated on YPDS agar containing 250 μg/ml Zeocin and incubated at 30° C. for three to four days. High producing clones were selected by colony lift immunoblot screening, as follows. Pre-wet nitrocellulose membranes were layered over the transformation plates and a fraction of each colony was lifted onto the membrane. The membrane was then placed colony side up on YPD agar containing 0.5% methanol and incubated overnight at 30° C. The membranes were then washed repeatedly with Tris buffered saline containing 0.5% Tween-20 (TBST) to remove colonies, then blocked for 30 minutes with TBST and 4% non-fat milk powder. The membranes were then placed in TBST containing 4% non-fat milk powder and horseradish peroxidase conjugated anti-c-myc antibody (Roche) for one hour. Finally, the membranes were washed extensively in TBST followed by a PBS washing step and scFv-secreting colonies were revealed by a chemofluorescence detection system (Apbiochem). Selected high producers were purified by streaking on YPD plates and were subsequently used for bivalent scFv expression. Small-scale expression cultures were carried out in shaker flasks essentially as described by the manufacturer's protocols (supra). BMGY medium was used for the cell expansion phase, while BMMY medium was used during the bivalent scFv expression phase. After 48 hours of induction, supernatants were clarified by repeated centrifugation. The supernatant was conditioned for purification by the addition of 1 M Na₂HPO₄ pH 8 to a concentration of 20 mM, 0.5 M Imidazole to a concentration of 10 mM, 5 M NaCl to a concentration of 500 mM. Hereafter, the samples were purified by immobilized metal affinity chromatography followed by anion exchange chromatography on an AKTAprime FPLC-system (Pharmacia). A 5 ml HiTrap chelating column (Pharmacia) was charged with NiSO₄ and equilibrated according to the manufacturer's instructions. Conditioned supernatant was loaded directly onto the column and washed extensively in equilibration buffer (20 mM Na₂PO₄ pH 8, 10 mM imidazole). Bivalent scFv were eluted directly off the column on to a 1 ml sepharose Q HP column (Pharmacia) in the presence of 250 mM imidazole pH 8.5. The column was then washed in 20 mM Tris-HCl pH 8, then briefly in 20 mM Na₂PO₄ pH 7.3, and bivalent scFvs were eluted off the column over a gradient of 0-0.5 M NaCl in 7 column volumes. Fractions were then measured for protein content and were analyzed for activity and purity. The bivalent scFvs of the selected scFvs called SC03-001, SC03-002, SC03-003, SC03-005, SC03-006, SC03-007, SC03-008, SC03-009, SC03-0010, SC03-012, SC03-013, SC03-014 and SC03-015 were called pyBi03-001C02, pyBi03-002C02, pyBi03-003C02, pyBi03-005C02, pyBi03-006C02, pyBi03-007C02, pyBi03-008C02, pyBi03-009C02, pyBi03-010C02, pyBi03-012C02, pyBi03-013C02, pyBi03-014C02, pyBi03-015C02, respectively.

### Example 5

Construction of Fully Human Immunoglobulin Molecules (Human Monoclonal Anti-SARS-CoV Antibodies) from the Selected Anti-SARS-CoV Single Chain Fvs

[0140] Heavy and light chain variable regions of the scFvs called SC03-001, SC03-002, SC03-009, SC03-013, SC03-014 and SC03-018 were PCR-amplified using oligonucleotides to append restriction sites and/or sequences for expression in the IgG expression vectors pSyn-C03—HCγ1 (see SEQ ID NO:110) and pSyn-C05-Cκ (see SEQ ID NO:111), respectively. The V_{L} gene shared between scFvs was amplified using oligonucleotides 5K-I (SEQ ID NO:112) and sy3K-C (SEQ ID NO:113) (see below) and the PCR products cloned into vector pSyn-C05—Cκ. Nucleotide sequences for all constructs were verified according to standard techniques known to the skilled artisan. V_{H} genes were amplified using the following oligonucleotide set: 5H-B (SEQ ID NO:114) and sy3H-A (SEQ ID NO:115). Thereafter, the PCR products were cloned into vector pSyn-C03-HCγ1 and nucleotide sequences were verified according to standard techniques known to the skilled person in the art.

| | |
|---|---|
| 5H-B | acctgtcttgaattctccatggccgaggtgcagct |
| | ggtggagtctg |
| sy3H-A | gcccttggtgctagcgctggagacggtcaccaggg |
| | tgccctggcccc |
| 5K-I | acctgtctcgagttttccatggctgacatccagat |
| | gacccagtctccatcctcc |
| sy3K-C | gggaccaaggtggagatcaaacggaccgtggccgc |
| | ccccagc |

[0141] The resulting expression constructs pgG103-001C03, pgG103-002C03, pgG103-009C03, pgG103-013C03, pgG103-014C03 and pgG103-018C03 encoding the anti-SARS-CoV human IgG1 heavy chains were transiently expressed in combination with the pSyn-C05-VkI construct encoding the common light chain in 293T cells and supernatants containing IgG1 antibodies were obtained. The nucleotide sequences of the heavy chains of the antibodies called 03-001, 03-002, 03-009, 03-013, 03-014 and 03-018 are shown in SEQ ID NOS:116, 118, 120, 122, 124 and 126, respectively. The amino acid sequences of the heavy chains of the antibodies called 03-001, 03-002, 03-009, 03-013, 03-014 and 03-018 are shown in SEQ ID NOS:117, 119, 121, 123, 125 and 127, respectively.

[0142] The nucleotide sequences of the light chain of antibodies 003-001, 03-002, 03-009, 03-013, 03-014 and 03-018 is shown in SEQ ID NO:128. The amino acid sequences of the light chain of antibodies 03-001, 03-002, 03-009, 03-013, 03-014 and 03-018 is shown in SEQ ID NO:129. Essentially as described above the antibodies called 03-006 and 03-015 were generated. The nucleotide sequences of the heavy chains of the antibodies called 03-006 and 03-015 are shown in SEQ ID NO:471 and SEQ ID NO:473, respectively. The amino acid sequences of the heavy chains of the antibodies called 03-006 and 03-015 are shown in SEQ ID NO:472 and SEQ ID NO:474, respectively. The nucleotide sequences of the light chain of antibodies called 03-006 and 03-015 are shown in SEQ ID NO:475 and SEQ ID NO:477, respectively. The amino acid sequences of the light chain of antibodies called 03-006 and 03-015 are shown in SEQ ID NO:476 and SEQ ID NO:478, respectively. Subsequently, the recombinant human monoclonal antibodies were purified over protein-A columns and size-exclusion columns using standard purification methods used generally for immunoglobulins (see for instance WO 00/63403 which is incorporated by reference herein).

### Example 6

Competition ELISA of Human Monoclonal Anti-SARS-CoV Antibodies and Single Chain Phage antibodies specific for SARS-CoV

[0143] To determine whether the above selected single-chain phage antibodies bind to similar or overlapping epitopes which are recognized by the recombinant human monoclonal anti-SARS-CoV antibodies of the invention a competition ELISA was performed. Briefly, a gamma-irradiated SARS-CoV preparation was immobilized as described supra. The immobilized SARS-CoV preparation and the selected single-chain phage antibodies were blocked in an equal volume of 4% ELK in PBS. Subsequently, the blocked immobilized SARS-CoV preparation was incubated with a blocked single-chain phage antibody in the presence or absence of 1 μg/ml of an anti-SARS-CoV IgG for one hour at room temperature. Binding of the single-chain phage antibody was monitored as described supra. A reduction of binding of the single-chain phage antibody to the SARS-CoV preparation in the presence of anti-SARS-CoV IgG compared to binding of single-chain phage antibody alone indicated that similar or overlapping epitopes were recognized by the single-chain phage antibody and the anti-SARS-CoV IgG. As shown in FIG. 4, the anti-SARS-CoV IgG called 03-001 was capable of significantly reduce binding of the single-chain phage antibodies SC03-001, SC03-005, and SC03-0010. The anti-SARS-CoV IgG called 03-002 reduced binding of both SC03-002 and SC03-012, whereas the anti-SARS-CoV IgGs called 03-009 and 03-018 reduced binding of the single-chain phage antibodies called SC03-009 and SC03-018, respectively. The anti-SARS-CoV IgGs called 03-013 and 03-014 reduced binding of SC03-013, SC03-014 and SC03-006. In addition, IgG pGg03-013 slightly reduced binding of SC03-015.

### Example 7

Screening Assay for SARS-CoV Neutralizing Activity of Recombinant Human Anti-SARS-CoV Bivalent scFvs and Recombinant Human Anti-SARS-CoV Antibodies

[0144] The SARS-CoV neutralization assay was performed on Vero cells (ATCC CCL 81). The SARS-CoV strains used in the neutralization assay were the Frankfurt 1 strain (for the complete genome of this strain see EMBL-database accession # AY291315) and the Frankfurt 2 strain, derived from a patient who acquired the infection from the Frankfurt 1—index case (Rickerts et al. 2003). This latter SARS-isolate has not yet been sequenced. Virus stocks of the strains were used in a titer of 4× 10³ TCID₅₀/ml (50% tissue culture infective dose per ml), with the titer calculated according to the well known method of Spearman and Kaerber. Recombinant human anti-SARS-CoV bivalent scFvs and recombinant human anti-SARS-CoV antibodies produced as described above were prescreened by serially two-fold dilution of the undiluted material in PBS starting from 1:10 (dilution range 1:10-1:320). A neutralization titer of >1:10 was regarded as specific evidence of reactivity of the bivalent scFvs or the antibodies against SARS-CoV in the prescreening assay. To determine the antibody-concentration-dependent neutralizing activity the bivalent scFvs or the antibodies against SARS-CoV were then adjusted to a protein concentration of 10 μg/ml and serially two-fold diluted in PBS (dilution range 1:2 to 1:512). In general, the neutralization assay worked as follows. 25 μl of the respective bivalent scFv or antibody dilutions were mixed with 25 μl of virus suspension (=approx. 100 TCID₅₀/25 μl) and incubated for one hour at 37° C. The suspension was then pipetted two times in triplicate into 96-well plates. Next, 50 μl of a freshly trypsinized and homogenized suspension of Vero cells (1:3 split of the confluent cell monolayer of a T75-flask), resuspended in DMEM containing 10% w/v fetal calf serum and antibiotics, were added. The inoculated cells were cultured for three to four days at 37° C. and observed daily for the development of cytopathic effect (CPE). CPE was compared to the positive control (virus inoculated cells) and negative controls (mock-inoculated cells or cells incubated with bivalent scFv or antibody only). The complete absence of CPE in an individual cell culture was defined as protection (=100% titer reduction). The serum dilution giving protection in 66% percent of wells was defined as the neutralizing antibody titer. Serum from one of the two well characterized SARS-patients was used as a positive control for the neutralization assay; the clinical history of these two patients has been published (see Rickerts et al. 2003).

[0145] As shown in Table 4, the bivalent scFvs called pyBi03-001C02, pyBi03-002C02, pyBi03-003C02, pyBi03-005C02, pyBi03-006C02, pyBi03-007C02, pyBi03-008C02, pyBi03-009C02, pyBi03-010C02, pyBi03-012C02, pyBi03-013C02, pyBi03-014C02, pyBi03-015C02 were tested for SARS-CoV neutralizing activity. Furthermore, two negative controls, i.e., pyBi02-148C02 (bivalent scFv binding to antigen L6) and pyBi02-006C02 (bivalent scFv binding to thyroglobulin) and one positive control, i.e., serum from a SARS-patient, were tested for neutralizing activity. It is clear from Table 4 that the bivalent scFvs pyBi03-013C02 and pyBi03-014C02 displayed significant neutralizing activity. The bivalents neutralize the Frankfurt 1 or Frankfurt 2 strain at a dilution factor of 80 or 160 in the above-described prescreening assay. In the light of the OD values and the neutralization titer, the neutralizing antibodies are useful in the prophylaxis and/or treatment of a condition resulting from SARS infection. Neutralization data obtained with human monoclonal anti-SARS-CoV antibodies indicated that the antibodies called 03-013 and 03-014 displayed neutralizing activity (data not shown). This confirmed the above results for the bivalent single chain Fvs.

[0146] In an alternative embodiment the SARS-CoV neutralization assay is performed on Vero cells (ATCC CCL 81). The SARS-CoV strain used in the assay is the Frankfurt 1 strain (for the complete genome of this strain see EMBL-database accession # AY291315). The strain is used in a titer of 1.6×10⁶ TCID₅₀/ml (50% tissue culture infective dose per ml). Recombinant antibodies (in phage antibody, scFv, bivalent or IgG1 format) are adjusted to a concentration of 10 μg/ml and then serially ten-fold or two-fold diluted in PBS to determine optimal inhibitory concentrations. 25 μl of the recombinant antibody are mixed with 25 μl of virus suspension (=150 TCID₅₀/25 μl) and incubated for one hour at 37° C. The suspension is then inoculated in triplicate onto sub-confluent Vero cells (approximately 80% density) grown in 96-well cell-culture plates. The inoculated cells are cultured for three to four days at 37° C. and observed daily for the development of cytopathic effect (CPE). CPE is compared to the positive control (virus inoculated cells) and negative controls (mock-inoculated cells or cells incubated with recombinant antibody only).

[0147] In yet another embodiment the SARS-CoV neutralization assay was performed on Vero cells (ATCC CCL 81) as follows. The SARS-CoV strain SCV-P4(5688) used in this assay was obtained from patient 5688 (who died from SARS) and then passaged four times on Vero cells (see Fouchier et al. (2003), Kuiken et al. (2003); strain is also called HK-39849 (GenBank accession number AY278491)). The virus strain was used in a titer of 2×10³ TCID₅₀/ml (50% tissue culture infective dose per ml), with the titer calculated according to the method of Spearman and Kaerber which is well known to the average skilled person. Recombinant expressed human anti-SARS-CoV antibodies were screened by serially two-fold dilution in PBS starting at a concentration of 50 μg/ml (dilution range 50-0.025 μg/ml). 50 μl of virus suspension (10, 30 or 100 TCID₅₀/50 μl) was mixed with 50 μl of the respective recombinant human anti-SARS-CoV antibody dilution and incubated for one hour at 37° C. The suspension was then pipetted two times in triplicate into 96-well plates containing an 80% confluent monolayer of Vero cells (seeded 16 to 20 hours in advance at a density of 1×10⁴ cells per well in DMEM containing 5% FBS). The Vero cells were cultured for four days at 37° C. and observed daily for the development of cytopathic effect (CPE). CPE was compared to the positive control (virus inoculated cells) and negative controls (mock-inoculated cells or cells incubated with recombinant antibody only). The complete absence of CPE in an individual cell culture was defined as protection (=100% titer reduction). The dilution giving protection in 66% percent of wells was defined as the neutralizing antibody titer. The results are shown in Table 7. On the upper row the concentration of the antibody in μg/ml is shown. In the left column of Table 7 the TCID₅₀ and name of the antibody used are shown. From Table 7 can be clearly deducted that the human anti-SARS-CoV antibodies called 03-013 and 03-014 contain SARS-CoV neutralizing activity. Complete protection from infectivity of 100TCID50 was reached at 170 nM for 03-013 and 42 nM for 03-014. In comparison the control antibody 02-027, a human monoclonal anti-EpCAM antibody, contained no neutralizing activity at all. The antibody called 03-006 did not show neutralizing capacity at the normal IgG dilution range, however subsequent neutralization assays revealed that 03-006 was capable of neutralizing SARS-CoV, but only at concentrations in the μM range (data not shown).

### Example 8

Screening Assay for Binding of Recombinant Human Anti-SARS-Antibodies to SARS-Infected Cells in an Indirect Immunofluorescence Staining Assay (IIF)

[0148] Vero cells (ATCC CCL 81), which were grown to sub-confluency, were inoculated with a multiplicity of infection (moi) of 0.1 with the Frankfurt-1 strain of SARS-CoV. The cells were observed daily for any cyotopathic effect (CPE), which usually became first visible on day two. As soon as CPE appeared, cells were gently harvested using a cell scraper, washed once in PBS and spread in a thin layer onto microscopic slides coated with Teflon grids. The cell suspensions were allowed to dry for 30 minutes and the slides were then fixed in ice-cold acetone for 15 minutes and stored at −80° C. until further use. Recombinant human antibodies against SARS-CoV were brought to a concentration of 10 μg/ml and were then further diluted two-fold in PBS. The microscopic slides were brought to room temperature and 20 μl of the recombinant antibody suspension were spotted per field (the microscopic slides contain ten or twelve fields). Sera from patients which have been infected with SARS-CoV were used as positive controls and serum of uninfected subjects as negative controls (see Rickerts et al. 2003). Slides were incubated in a humid chamber at 37° C. for one hour and washed two times in PBS at room temperature. Working solutions of fluorescein-isothiocyanate-labeled secondary antibodies, i.e., anti-huIgG-FITC, were prepared as is known in the art. Twenty μl of the secondary antibody was applied to each spot on the slides. After a further incubation of 30 minutes at 37° C., slides were washed again twice and coverslips were mounted on the slides. Slides were read using a fluorescent microscope, comparing the specific fluorescence (number of fluorescent cells and morphology) of the slides contacted with the recombinant antibodies with the slides contacted with the positive and negative controls. In Table 5, the data of the IIF assay are presented. The recombinant human monoclonal anti-SARS-CoV antibodies called 03-014 and 03-018 showed clear cytoplasmic staining of the cells infected with SARS-CoV. Clear staining was also observed with the recombinant human monoclonal anti-SARS-CoV antibody called 03-009 (data not shown).

### Example 9

Characterization of SARS-CoV Preparations Inactivated by Gamma- or UV-Irradiation

[0149] All procedures were performed at room temperature unless stated otherwise. An inactivated SARS-CoV preparation (Frankfurt 1 strain) was prepared as follows. Medium from Vero cells which were infected with O.I moi SARS-CoV strain Frankfurt 1 was harvested as soon as cyotopathic effect (CPE) was observed. Cells were once frozen at −20° C. and thawed. Cell debris was removed by centrifugation of the harvested medium for 15 minutes at 3000 rpm. The obtained supernatant was collected, spun again for 15 minutes at 3000 rpm and transferred to a clean tube. Subsequently, ultracentrifuge tubes were filled with 10 ml sterile 25% v/v glycerol in PBS. 20 ml of the cleared supernatant was gently applied on the glycerol cushion and the tubes were spun for two hours at 20,000 rpm at 4° C. in a Beckman SW28 rotor. The supernatant was discarded and the virus pellets were resuspended in 1 ml TNE buffer (10 mM Tris-HCl pH 7.4, 1 mM EDTA, 200 mM NaCl) and stored at −80° C. Next, the resuspended virus pellets were either gamma-irradiated with a dose at 45 kGy on dry ice, or UV-irradiated at 4° C. for 15 minutes (UV-B radiation 280-350 nm; λmax 306 nm). Subsequently, they were tested for the absence of infectivity in cell culture. If absence of infectivity was established, the thus obtained inactivated SARS-CoV preparations were used for further experiments. To determine whether the isolated anti-SARS-CoV human IgG antibodies were capable of binding SARS preparations that were inactivated as described supra ELISA experiments were performed. The SARS-CoV preparations were diluted 1:250 in coating buffer (50 mM carbonate buffer, pH 9.6) and immobilized over night at 4° C. on Maxisorp™ ELISA plates. The ELISA plates were washed three times with PBS and incubated with human anti-SARS-CoV and control IgG (called 02-027) at concentrations of 1 and 5 μg/ml in PBS containing 1% BSA for one hour at room temperature. Subsequently, the plates were washed two times with PBS containing 0.05% Tween-20 and IgG bound was detected using an anti-human-IgG-HRP-conjugate (Pharmingen) at 492 nm.

[0150] As shown in FIG. 5, the anti-SARS-CoV antibody called 03-001 and 03-002 were capable of binding both the UV- and gamma-irradiated SARS-CoV preparation to a similar extent. In contrast, the antibodies called 03-009 and 03-018 preferably bound to the gamma-irradiated SARS-CoV preparation, whereas the antibodies called 03-013 and 03-014 preferably bound to the UV-irradiated SARS-CoV preparation. The above might indicate that the antibodies called 03-009 and 03-018 bind a viral antigen that becomes more exposed upon the vigorous gamma-irradiation of the virus. The above might also indicate that the gamma-irradiation might damage the antigen recognized by the antibodies 03-013 and 03-014.

### Example 10

Characterization of Anti-SARS-CoV IgG Antibodies in Sandwich ELISA

[0151] To determine if upon denaturation of a SARS-CoV preparation, more antigen becomes accessible for the isolated recombinant human monoclonal anti-SARS-CoV antibodies and to determine which antigens are detected by the human monoclonal anti-SARS-CoV antibodies, the following sandwich ELISA was performed. For the detection of bound antigens different anti-SARS-CoV rabbit antisera were used. The sandwich ELISA was performed as follows. Human anti-SARS-CoV antibodies or the control antibody called 02-300 (an antibody against CD46) were immobilized over night at 4° C. to Maxisorp™ ELISA plates at a concentration of 5 μg/ml in coating buffer (50 mM carbonate buffer, pH 9.6). The plates were washed three times with PBS and blocked with PBS containing 1% BSA. Next, a gamma-irradiated SARS-CoV preparation prepared as described herein was denatured by diluting the preparation 1:10 in RIPA buffer (150 mM NaCl, 1% Nonidet P-40, 0.5% deoxycholate, 0.1% sodium dodecyl sulphate, 50 mM Tris, pH 8.0) followed by an incubation of one hour at room temperature. Subsequently, the denatured virus preparation was diluted 1:10 in PBS containing 1% BSA and the immobilized human IgGs were incubated with the denatured virus preparation for one hour at room temperature. To recognize which proteins of the SARS-CoV were detected by the immobilized recombinant human monoclonal anti-SARS-CoV antibodies polyclonal rabbit antibodies recognizing the complete SARS-CoV, the spike protein of SARS-CoV (Imgenex IMG-542 or IMG-557) or the nucleocapsid protein of SARS-CoV (Imgenex IMG-543). Finally, bound rabbit IgG was detected (using OD 492 nm measurement) using an anti-rabbit-IgG-HRP-conjugate (Dako).

[0152] As shown in FIG. 6A (detection by means of a polyclonal serum against complete SARS-CoV), the recombinant human monoclonal anti-SARS-CoV antibodies called 03-009, 03-013, 03-014 and 03-018 were all capable of binding both a native and a denatured SARS-CoV preparation. The increased signal after denaturation might have been caused by the exposure of more antigenic sites upon denaturation. When detection was performed by means of two polyclonal rabbit antibodies against the SARS-CoV spike protein (FIGS. 6B and 6D for the antibodies called IMG-542 and IMG-557, respectively), the values for the antibodies called 03-013 and 03-014 were higher compared to those for 03-009 and 03-018, which indicated that the antibodies called 03-013 and 03-014 are directed to the spike protein of SARS-CoV. When detection was performed using polyclonal antibodies against the SARS-CoV nucleocapsid protein (FIG. 6C for the antibody called IMG-543), the values for the antibodies called 03-009 and 03-018 were higher compared to the values of the antibodies called 03-013 and 03-014, especially when the virus was denatured, indicating that 03-009 and 03-018 are directed to the nucleocapsid (N) protein of SARS-CoV. Based on the above it might be concluded that the recombinant human monoclonal anti-SARS-CoV antibodies called 03-009 and 03-018 are directed to the nucleocapsid protein of SARS-CoV, while the recombinant human monoclonal anti-SARS-CoV antibodies called 03-013 and 03-014 are directed to the spike protein of SARS-CoV.

### Example 11

Identification of Epitopes Recognized by Recombinant Human Anti-SARS-CoV Antibodies by PEPSCAN-ELISA

[0153] Fifteen-mer linear and looped/cyclic peptides were synthesized from proteins of SARS-CoV and screened using credit-card format mini-PEPSCAN cards (455 peptide formats/card) as described previously (see inter alia WO 84/03564, WO 93/09872, Slootstra et al. 1996). All peptides were acetylated at the amino terminus. In short, series of overlapping peptides, which were either in linear form or in looped/cyclic form, of all the (potential) proteins of SARS-CoV Urbani, these proteins being called spike protein (the protein-id of the surface spike glycoprotein in the EMBL-database is AAP13441), protein X1 (the protein-id of protein X1 is AAP13446), protein X2 (the protein-id of protein X1 is AAP13447), E protein (the protein-id of the small envelope protein, E protein, is AAP13443), M protein (the protein-id of the membrane protein, M protein, is AAP13444), protein X3 (the protein-id of protein X3 is AAP13448), protein X4 (the protein-id of protein X4 is AAP13449), protein X5 (the protein-id of protein X5 is AAP13450), and N protein (the protein-id of the nucleocapsid protein, N protein, is AAP13445), were produced and tested for binding to the recombinant human anti-SARS-CoV antibodies of the invention by means of PEPSCAN analysis.

[0154] Because the Urbani proteins indicated above are also found in identical or highly homologous form in other SARS-CoV strains, the antigenic peptides found in the analysis method may not only be used for detection of the SARS-CoV strain Urbani and the prevention and/or treatment of a condition resulting from the SARS-CoV strain Urbani, but may also be useful in detecting SARS-CoV in general and preventing and/or treating a condition resulting from SARS-CoV in general. The protein-id of the surface spike glycoprotein of for instance the SARS-CoV strains TOR2, Frankfurt 1 and HSR 1 in the EMBL-database is AAP41037, AAP33697 and AAP72986. The accession number in the EMBL-database of the complete genome of the strains TOR2, Frankfurt 1 and HSR 1 is AY274119, AY291315 and AY323977, respectively. Under these accession numbers the amino acid sequence of the other (potential) proteins of these strains can be found.

[0155] As indicated above, several proteins of SARS-CoV, such as inter alia the spike protein and the N protein, are shared by all SARS-CoV strains. However, the strains TOR2, Frankfurt 1 and HSR 1 contain open reading frames encoding (potential) proteins that are not present in the SARS-CoV strain Urbani. In the SARS-CoV strain called TOR2 these (potential) proteins are called Orf9, Orf10, Orf13 and Orf14. The first three of these (potential) proteins are also found in the SARS-CoV strains called Frankfurt 1 and HSR 1. In these strains the (potential) proteins are called Orf7b, Orf8a and Orf9b, respectively. The coding sequence (CDS) of the (potential) proteins of SARS-CoV TOR2 is shown under EMBL-database accession number AY274119, the coding sequence (CDS) of the (potential) proteins of SARS-CoV HSR 1 can be found under accession number AY323977, the coding sequence (CDS) of the (potential) proteins of SARS-CoV Frankfurt 1 can be found under accession number AY291315. Series of overlapping peptides, which were either in linear form or in looped/cyclic form, of all the (potential) proteins of SARS-CoV TOR2 were also produced and tested for binding to the recombinant human anti-SARS-CoV antibodies of the invention by means of PEPSCAN analysis. Because the TOR2 proteins indicated above are also found in identical or highly homologous form in several other SARS-CoV strains, such as for instance the strains called Frankfurt 1 and HSR 1, the peptides found in the analysis method may not only be used for detection of the SARS-CoV strain TOR2 and the prevention and/or treatment of a condition resulting from the SARS-CoV strain TOR2, but may also be useful in detecting SARS-CoV strains which express these (potential) proteins and preventing and/or treating a condition resulting from SARS-CoV which express these (potential) proteins.

[0156] In all looped peptides position-2 and position-14 were replaced by a cysteine (acetyl-XCXXXXXXXXXXXCX-minicard). If other cysteines besides the cysteines at position-2 and position-14 were present in a prepared peptide, the other cysteines were replaced by an alanine. The looped peptides were synthesized using standard Fmoc-chemistry and deprotected using trifluoric acid with scavengers. Subsequently, the deprotected peptides were reacted on the cards with an 0.5 mM solution of 1,3-bis(bromomethyl)benzene in ammonium bicarbonate (20 mM, pH 7.9/acetonitril (1:1 (v/v)). The cards were gently shaken in the solution for 30 to 60 minutes, while completely covered in the solution. Finally, the cards were washed extensively with excess of H₂O and sonicated in disrupt-buffer containing 1% SDS/0.1% beta-mercaptoethanol in PBS (pH 7.2) at 70° C. for 30 minutes, followed by sonication in H₂O for another 45 minutes.

[0157] Recombinant human anti-SARS-CoV antibodies were tested for binding to each linear and looped peptide in a PEPSCAN-based enzyme-linked immuno assay (ELISA). The 455-well creditcard-format polypropylene cards, containing the covalently linked peptides, were incubated with the antibodies (1 μg/ml; diluted in blocking solution which contains 5% horse-serum (v/v) and 5% ovalbumin (w/v)) (4° C., overnight). After washing, the peptides were incubated with anti-human antibody peroxidase (dilution 1/1000) (one hour, 25° C.), and subsequently, after washing, the peroxidase substrate 2,2′-azino-di-3-ethylbenzthiazoline sulfonate (ABTS) and 2 μl/ml 3% H₂O₂ were added. Controls (for linear and looped) were incubated with anti-human antibody peroxidase only. After one hour, the color development was measured. The color development of the ELISA was quantified with a CCD-camera and an image processing system. The setup consisted of a CCD-camera and a 55 mm lens (Sony CCD Video Camera XC-77RR, Nikon micro-nikkor 55 mm f/2.8 lens), a camera adaptor (Sony Camera adaptor DC-77RR) and the Image Processing Software package Optimas, version 6.5 (Media Cybernetics, Silver Spring, Md. 20910, U.S.A.). Optimas runs on a pentium II computer system.

[0158] The recombinant human anti-SARS-CoV-antibodies were tested for binding to the 15-mer linear and looped/cyclic peptides synthesized as described supra. Relevant binding of a peptide to a recombinant human anti-SARS-CoV antibody was calculated as follows. The average OD-value for each antibody was calculated for the respective proteins (sum of OD-values of all peptides/total number of peptides). Next, the standard deviation of this average was calculated. The standard deviation was multiplied by two and the obtained value was added to the average value to obtain the correction factor. The OD-value of each peptide was then divided by this correction factor. If a value of 0.9 or higher was found, then relevant binding was considered to be present between the specific peptide and the respective antibody. Particularly interesting appear to be domains comprising several relevant peptides. These domains are indicated (colored grey) in Table 6. The recombinant human anti-SARS-CoV antibody called 03-018 reacted with peptides of the nucleocapsid (N) protein. The peptides recognized include NGPQSNQRSAPRITF (SEQ ID NO:97), GPQSNQRSAPRITFG (SEQ ID NO:98), PQSNQRSAPRITFGG (SEQ ID NO:99), QSNQRSAPRITFGGP (SEQ ID NO:100), SNQRSAPRITFGGPT (SEQ ID NO:101), NQRSAPRITFGGPTD (SEQ ID NO:102), QRSAPRITFGGPTDS (SEQ ID NO:103), RSAPRITFGGPTDST (SEQ ID NO:104), SAPRITFGGPTDSTD (SEQ ID NO:105), APRITFGGPTDSTDN (SEQ ID NO:106), PRITFGGPTDSTDNN (SEQ ID NO:107), RITFGGPTDSTDNNQ (SEQ ID NO:108) and ITFGGPTDSTDNNQN (SEQ ID NO:109). The highest binding of the recombinant human anti-SARS-CoV antibody called 03-018 was with a continuous series of linear and looped peptides starting with the sequence GPQSNQRSAPRITFG (SEQ ID NO:98) and ending with the sequence RSAPRITFGGPTDST (SEQ ID NO:104), thereby mapping the minimal binding site of 03-018 to the sequence RSAPRITFG (SEQ ID NO:468), which corresponds with residues 11-19 of the N protein. Strikingly, this linear epitope is conserved in the N protein sequence of all published human SARS-CoV and animal SARS-CoV-like isolates, but is absent in other members of the family of Coronaviridae. The PEPSCAN analysis further revealed that the recombinant human N protein specific anti-SARS-CoV antibody called 03-009 did not recognize a stretch of linear or looped amino acids on the N protein suggesting that this antibody recognizes a non-linear/conformational epitope of the N protein. All of the above peptides or parts thereof are useful in the detection of SARS-CoV in general.

### Example 12

Selection of Single-Chain Phage Antibodies Specifically Recognizing Proteins Derived from SARS-CoV Using Transfected HEK293T-Cells

[0159] In another assay the single-chain phage antibodies are analyzed for their ability to bind HEK293T cells that recombinantly express proteins of the SARS-CoV. To this purpose HEK293T cells are transfected with a plasmid carrying a cDNA sequence encoding the envelope (E) protein, membrane (M) protein or spike (S) protein from SARS-CoV strain Frankfurt 1 or with the empty vector. Stable transfectants are selected using standard techniques known to a person skilled in the art (see J. E. Coligan, B. M. Dunn, H. L. Ploegh, D. W. Speicher and P. T. Wingfield (eds.) (2001) Current protocols in protein science, volume I, John Wiley & Sons, Inc., New York). For flow cytometry analysis, single-chain phage antibodies are first blocked in an equal volume of 4% PBS-M for 15 minutes at 4° C. prior to the staining of the transfected HEK293T cells. The blocked phage antibodies are added to control transfected HEK293T cells and HEK293T cells transfected with the SARS-CoV proteins mentioned above. The binding of the single chain phage antibodies to the cells is visualized using a biotinylated anti-M 13 antibody (Santa Cruz Biotechnology) followed by streptavidin-phycoerythrin (Caltag).

[0160] In yet another assay scFv antibodies were analyzed for their ability to bind to portions of the spike (S) protein and the complete nucleocapsid (N) protein of SARS-CoV. The cDNA encoding the S protein of the SARS-CoV strain Frankfurt 1 was adapted to the codon-bias of Homo sapiens genes and gene-optimized for optimal expression by Geneart (Regensburg, Germany). The codon-optimized nucleotide sequence of the S protein is shown in SEQ ID NO:462. The amino acid sequence encoded by this codon-optimized nucleotide sequence is shown in SEQ ID NO:463.

[0161] DNA encoding for the N-terminal 565 amino acids (portion called S565) was cloned as a KpnI-BamHI fragment in pAdapt (Havenga et al., 2001) that was modified by insertion of the polylinker of the vector called pcDNA3.1/myc-His C (Invitrogen) (vector called pAdapt/myc-His C).

[0162] DNA encoding for the N-terminal 826 amino acids (portion called S826) was cloned as KpnI-EcoRV fragment in pAdapt that was modified by insertion of the polylinker of the vector called pcDNA3.1/myc-His B (Invitrogen) (vector called pAdapt/myc-His B).

[0163] DNA encoding for the N-terminal 1195 amino acids (portion called S1195) is constructed as follows. A DNA fragment is amplified from codon-optimized S protein cDNA using the oligonucleotide primers: XhoISpikeRevCOG 5′-gttcctcgaggggccacttgatgtactgc-3′ (SEQ ID NO:464) and SpikeCOG seq 1 5′-ccaggtgaagcagatgta-3′ (SEQ ID NO:465). The resulting fragment is cloned as BstEII-XhoI fragment together with a KpnI-BstEII fragment derived from the codon-optimized S protein cDNA (alternatively, a restriction site other than BstEII, which is unique in the amplified fragment can be used) in pAdapt that is modified by insertion of the polylinker of the vector called pcDNA3.1/myc-His A (Invitrogen) (vector called pAdapt/myc-His A).

[0164] A fragment corresponding to amino acid residues 318-510 of the S protein (portion called S318-510) was amplified on S gene cDNA using the oligonucleotide primers: EcoRIspikeFor318 5′-cctggaattctccatggccaacatcaccaacc-3′ (SEQ ID NO:469) and XbaIspikeRev510 5′-gaagggccctctagacacggtggcagg-3′ (SEQ ID NO:470). The resulting fragment was digested with EcoRI-XbaI and cloned into pHAVT20/myc His A to yield pHAVT20/myc-His A S318-510. In this vector expression of fragment S318-510 fused to the HAVT20 leader sequence was under control of the human, full-length, immediate-early CMV promoter.

[0165] DNA encoding for the nucleocapsid protein was amplified from total random hexamer cDNA from the SARS-CoV strain Frankfurt 1 using the oligonucleotide primers KpnINCFor 5′-cttggtaccgccaccatgtctgataatggacc-3′ (SEQ ID NO:466) and XbaINCRev 5′-gttctctagatgcctgagttgaatcagc-3′ (SEQ ID NO:467) and cloned as KpnI-XbaI fragment in pAdapt/myc-His A. DNA transfections were performed in HEK293T cells for transient expression using standard techniques. The S protein derived fragments and nucleocapsid (N) protein were used directly from culture supernatant or cell lysates. Alternatively, the fragments and nucleocapsid (N) protein were purified from culture supernatant using Ni-NTA (Qiagen).

[0166] The ELISA for the detection of scFv antibodies to the S protein derived fragments or the nucleocapsid (N) protein was performed as follows. Wells of ELISA plates were coated overnight with 5 μg/ml anti-myc antibody in 50 mM bicarbonate buffer pH 9.6. In case of the UV-inactivated SARS-CoV preparation, the wells were coated with the preparation as described above. The wells of the plates were washed three times with PBS containing 0.05% Tween and blocked for two hours at 37° C. with PBS containing 1% BSA. The wells coated with anti-myc antibody were incubated with culture supernatant or cell lysate containing the myc-tagged fragment S565 or nucleocapsid (N) protein diluted in PBS containing 1% BSA for one hour at room temperature. The wells were washed three times with PBS containing 0.05% Tween. Next, the scFvs SC03-014 and SC03-009 were diluted in PBS containing 0.05% Tween and were incubated for one hour at room temperature. The wells were washed three times with PBS containing 0.05% Tween and incubated for 1 hour at room temperature using an anti-VSV-HRP conjugate (for scFv). As shown in FIG. 8, SC03-009 and SC03-014 were both capable of binding an inactivated SARS-CoV preparation in ELISA in contrast to the control scFv SC02-006 (Anti-thyroglobulin scFv). Testing the reactivity of the scFvs with SARS-CoV derived proteins or portions captured through their myc-tag revealed that SC03-009 was capable of binding to the nucleocapsid (N) protein, but not the spike fragment S565 and an irrelevant control myc-tagged protein (the bivalent scFv called 02-300). In contrast, SC03-014 only reacted with the S565 fragment and not with the nucleocapsid (N) protein and the control protein 02-300. For ELISA experiments with IgGs (see below) a murine anti-Hu-IgG HRP conjugate instead of an anti-VSV-HRP conjugate was used. Development was done with O-phenylenediamine substrate, the reaction was stopped by the addition of 1M H₂SO₄ and the absorbance was measured at 492 nm. Similar results were obtained in ELISA experiments when the wells coated with anti-myc antibody were incubated with myc-tagged fragment S565 or nucleocapsid (N) protein which was first purified from culture supernatant or cell lysate using Ni-NTA (data not shown).

[0167] To further investigate binding to the SARS coronavirus fragments and proteins, the following experiments were performed with the monoclonal antibodies 03-001, 03-002, 03-006, 03-009, 03-013, 03-014, 03-015 and 03-018. Full length N protein from transfected HEK293T cell lysates was captured on an ELISA plate by means of an anti-myc antibody as described above and incubated with the above mentioned IgG molecules. FIG. 9 shows that the monoclonal antibodies 03-009 and 03-018 bound specifically to the N protein, while not binding the control protein, i.e., bivalent scFv 02-300.

[0168] In order to rank the affinities of the monoclonal antibodies binding the N protein, a titration of IgG concentration (by diluting the antibodies in PBS containing 1% ELK) followed by ELISA as described above was performed. Titration of the monoclonal antibodies showed that 03-009 bound better to the N protein than 03-018 (see FIG. 10). This may reflect a difference in affinity.

[0169] To further explore the antibody binding sites within the N protein, a competition ELISA on immobilized N protein was performed. Captured N protein was incubated with 1 μg/ml (non-saturating) biotinylated antibody 03-009 without competing antibody or in the presence of a 25- or 50-fold excess of competing antibody (antibody 03-009 or 03-018). Bound biotinylated antibody 03-009 was detected with streptavidin-conjugated-HRP (BD Pharmingen) and developed as described above. Results (see FIG. 11) show that binding of monoclonal antibody 03-009 is unaffected in the presence of a 25- or 50-fold excess of unlabeled monoclonal antibody 03-018. This demonstrated that the antibodies 03-009 and 03-018 do not compete with each other for binding to the N protein and recognize different epitopes.

[0170] Subsequently, the interaction of the above antibodies with the S protein was evaluated. Binding of the antibodies to the full length S protein expressed on HEK293T cells was first investigated by flow cytometry. The transfected cells were incubated with human IgGs at a concentration of 10 μg/ml for one hour on ice. Cells were washed three times, incubated for 45 minutes with biotinylated goat anti-human IgG followed by a ten minute incubation with streptavidin-conjugated phycoerythin. The analysis showed that the monoclonal antibodies 03-006, 03-013, 03-014 and 03-015 specifically bound S protein transfected HEK293T cells (see FIG. 12).

[0171] To further localize the binding site of these antibodies within the S protein, binding to a recombinant soluble fragment encompassing S protein residues 1-565 (S565) was tested by means of ELISA as described above. Within the antibody panel binding the full length S protein on the HEK293T cells, all antibodies except 03-015 bound to fragment S565 (see FIG. 12).

[0172] To further narrow the binding site of the antibodies, binding to a recombinant fragment comprising residues 318-510 of the S protein (S318-510) was evaluated. FIG. 12 shows that only 03-006, 03-013 and 03-014 were capable of binding the S318-510 fragment.

[0173] As shown in a titration experiment performed similarly as the titration experiment described above, antibody 03-014 appeared to bind S565 with a higher affinity than the antibodies 03-006 and 03-013 (see FIG. 13).

[0174] Using a similar set-up as described above, a competition ELISA was performed. Captured S565 was incubated with 1 μg/ml (nonsaturating) biotinylated antibody 03-014 without competing antibody or in the presence of a 25- or 50-fold excess of competing IgG (antibody 03-006 or 03-014). Bound biotinylated antibody 03-014 was detected with streptavidin-conjugated-HRP (BD Pharmingen) and developed as described above. The competition ELISA revealed that binding of antibody 03-014 was unaffected in the presence of a 25- or 50-fold excess of unlabeled 03-006 and it was concluded that their binding sites do not overlap (see FIG. 14).

[0175] Flow cytometry analysis was used to assay binding of the fragments of the S protein to angiotensin-converting enzyme 2 (ACE2), the natural receptor for SARS-CoV infectivity (Li et al., 2003). Vero cells expressing ACE2 (measured by means of a polyclonal anti-ACE2 antibody (R&D systems)) were incubated for one hour at 4° C. with saturating concentrations of the myc-tagged S565 fragment. As a control the Vero cells were incubated with a myc-tagged bivalent scFv 02-006. Alternatively, the S565 fragment was incubated with the IgG antibodies 03-014 (anti-SARS-CoV S protein antibody), 03-018 (anti-SARS-CoV N protein antibody) or 02-027 (anti-EPCAM control antibody) prior to incubation with the Vero cells. After three washes, bound fragment and the control protein were detected by flow cytometry analysis by using biotinylated anti-myc antibody (Santa Cruz Biotechnology Inc.) and streptavidin-conjugated phycoerythrin (Caltag). All incubations and washes were performed at 4° C. in PBS, supplemented with 0.5% bovine serum albumin (BSA). As shown in FIG. 15, preincubation of fragment S565 in the presence of 0.5 μM antibody 03-014 resulted in complete loss of S565 binding to Vero cells, whereas in the presence of antibody 0.5 μM antibody 03-018 (see FIG. 16) or 0.5 μM antibody 02-027 (see FIG. 17), S565 binding to Vero cells remained unaffected. In conclusion, monoclonal antibody 03-014 blocked binding of S565 to Vero cells, whereas the antibodies 03-018 and 02-027 did not. In an identical experiment it was shown that antibody 03-006 was capable of partially blocking binding of the S565 fragment to Vero cells (data not shown). Together, these data suggest that antibody 03-014 neutralizes SARS-CoV, by preventing the interaction of the S protein to cellular receptors such as ACE2.

### Example 13

Construction of a ScFv Phage Display Library Using Peripheral Blood Lymphocytes of a Patient Having been Exposed to SARS-CoV

[0176] Lymphocytes were obtained from a patient recovered from SARS-CoV (see Rickerts et al. 2003) and frozen in liquid nitrogen. The lymphocytes were quickly thawed in a 37° C. water bath and transferred to wet-ice. The lymphocytes were diluted with cold DMEM culture medium to a final volume of 50 ml in a 50 ml tube and centrifuged for 5 minutes at 350×g. The obtained cell pellet was suspended in 5 ml DMEM and cell density was determined microscopically using trypan-blue exclusion to visualize dead cells. All cells (˜5×10⁶) were spun again for 5 minutes at 350×g, decanted and suspended in residual fluid (DMEM). Total RNA was prepared from these cells using organic phase separation (TRIZOL™) and subsequent ethanol precipitation. The obtained RNA was dissolved in DEPC treated ultrapure water and the concentration was determined by OD 260 nm measurement. Thereafter, the RNA was diluted to a concentration of 100 ng/μl. Next, 1 μg of RNA was converted into cDNA as follows: To 10 μl total RNA, 13 μl DEPC treated ultrapure water and 1 μl random hexamers (500 ng/μl) were added and the obtained mixture was heated at 65° C. for five minutes and quickly cooled on wet-ice. Then, 8 μl 5× First-Strand buffer, 2 μl dNTP (10 mM each), 2 μl DTT (0.1 M), 2 μl Rnase-inhibitor (40 U/μl) and 2 μl Superscript™III MMLV reverse transcriptase (200 U/μl) were added to the mixture, incubated at room temperature for five minutes and incubated for one hour at 50° C. The reaction was terminated by heat inactivation, i.e., by incubating the mixture for 15 minutes at 75° C.

[0177] The obtained cDNA products were diluted to a final volume of 200 μl with DEPC treated ultrapure water. The OD260 nm of a 50 times diluted solution (in 10 mM Tris buffer) of the dilution of the obtained cDNA products gave a value of 0.1.

[0178] Five to 10 μl of the diluted cDNA products were used as template for PCR amplification of the immunoglobulin gamma heavy chain family and kappa or lambda light chain sequences using specific oligonucleotide primers (see Tables 8-15). PCR reaction mixtures contained, besides the diluted cDNA products, 25 pmol sense primer and 25 pmol anti-sense primer in a final volume of 50 μl of 20 mM Tris-HCl (pH 8.4), 50 mM KCl, 2.5 mM MgCl₂, 250 μM dNTPs and 1.25 units Taq polymerase. In a heated-lid thermal cycler having a temperature of 96° C., the mixtures obtained were quickly melted for two minutes, followed by 30 amplification cycles of: 30 seconds at 96° C., 30 seconds at 60° C. and 60 seconds at 72° C. In a first round amplification, each of nine sense directed primers (see Table 8; covering all families of heavy chain variable regions) was combined with an IgG specific constant region anti-sense primer called HuCIgG 5′-GTC CAC CTT GGT GTT GCT GGG CTT-3′ (SEQ ID NO:131) yielding nine products of about 650 basepairs. These products were purified on a 2% agarose gel and isolated from the gel using Qiagen gel-extraction columns. One-tenth of each of the isolated products was used in an identical PCR reaction as described above using the same nine sense primers (covering all families of heavy chain variable regions), whereby each sense primer was combined with one of the four J-region specific anti-sense primers (see Table 9). This resulted in 36 products of approximately 350 basepairs. The products obtained were purified on a 2% agarose gel and isolated from the gel using Qiagen gel-extraction columns. In a third round, 1/10 of each of the isolated products was subjected to re-amplification with the same set of primers as in the second round with the proviso that the primers used were extended with restriction sites (see Table 10) to enable directed cloning in the phage display vector pDV-C05 (see FIG. 7 and SEQ ID NO:130). This resulted again in 36 products. These products were pooled per used (VH) sense primer into nine fractions. In the next step, 2.5 μg of pooled fraction and 100 μg pDV-C05 vector were digested with NcoI and XhoI and purified by gel. Thereafter, a ligation was performed overnight at 16° C. as follows. To 500 ng pDV-C05 vector 70 ng pooled fraction was added in a total volume of 50 μl ligation mix containing 50 mM Tris-HCl (pH 7.5), 10 mM MgCl₂, 10 mM DTT, 1 mM ATP, 25 μg/ml BSA and 2.5 μl T4 DNA Ligase (400 u/μl). This procedure was followed for each pooled fraction. The ligation mixes were purified by phenol/chloroform, followed by a chloroform extraction and ethanol precipitation, methods well known to the skilled artisan. The DNA obtained was dissolved in 50 μl ultrapure water and per ligation mix two times 2.5 μl aliquots were electroporated into 40 μl of TG1 competent E. coli bacteria according to the manufacturer's protocol (Stratagene). Transformants were grown overnight at 37° C. in a total of 27 dishes (three dishes per pooled fraction; dimension of dish: 240 mm×240 mm) containing 2TY agar supplemented with 50 μg/ml ampicillin and 4.5% glucose. A (sub)library of variable heavy chain regions was obtained by scraping the transformants from the agar plates. This (sub)library was directly used for plasmid DNA preparation using a Qiagen™ kit.

[0179] The light chain immunoglobulin sequences were amplified from the same cDNA preparation in a similar three round PCR procedure and identical reaction parameters as described above for the heavy chain regions with the proviso that the primers depicted in Tables 11 to 15 were used. The first amplification was performed using a set of seventeen light chain variable region sense primers (eleven for the lambda light chain (see Table 11) and six for the kappa light chain (see Table 12)) each combined with an anti-sense primer recognizing the C-kappa called HuCk 5′-ACACTCTCCCCTGTTGAAGCT CTT-3′ (see SEQ ID NO:158) or C-lambda constant region HuCλ2 5′-TGAACATTCTGTAGGGGCCACTG-3′ (see SEQ ID NO:159) or HuCλ7 5′-AGAGCATTCTGCAGGGGCCACTG-3′ (see SEQ ID NO:160) (the HuCλ2 and HuCλ7 anti-sense primers were mixed to equimolarity before use), yielding 17 products of about 600 basepairs. These products were purified on a 2% agarose gel and isolated from the gel using Qiagen gel-extraction columns. One-tenth of each of the isolated products was used in an identical PCR reaction as described above using the same seventeen sense primers, whereby each lambda light chain sense primer was combined with one of the three Jlambda-region specific anti-sense primers (see Table 13) and each kappa light chain sense primer was combined with one of the five Jkappa-region specific anti-sense primers (see Table 14). This resulted in 63 products of approximately 350 basepairs. The products obtained were purified on a 2% agarose gel and isolated from the gel using Qiagen gel-extraction columns. In a third round, 1/10 of each of the isolated products was subjected to re-amplification with the same set of primers as in the second round with the proviso that the primers used were extended with restriction sites (see Table 15) to enable directed cloning in the heavy chain (sub)library vector. This resulted again in 63 products. These products were pooled to a total of ten fractions. This number of fractions was chosen to maintain the natural distribution of the different light chain families within the library and to over or under represent certain families. The number of alleles within a family was used to determine the percentage of representation within a library (see Table 16). Next, the fractions were digested with SalI and NotI and ligated in the heavy chain (sub)library vector, which was cut with the same restriction enzymes, using the same ligation procedure and volumes as described above for the heavy chain (sub)library. Ligation purification and subsequent transformation of the resulting definitive library was also performed as described above for the heavy chain (sub)library. The transformants were grown in 30 dishes (three dishes per pooled fraction; dimension of dish: 240 mm×240 mm) containing 2TY agar supplemented with 50 μg/ml ampicillin and 4.5% glucose. All bacteria were harvested in 2TY culture medium containing 50 μg/ml ampicillin and 4.5% glucose, mixed with glycerol to 15% (v/v) and frozen in 1.5 ml aliquots at −80° C. Rescue and selection of the library were performed as described supra for the non-immune libraries.

[0180] Additionally, a naïve phage display library of scFvs was prepared. For that purpose, healthy donor peripheral blood lymphocytes were used as source of immuno globulin transcripts. Using the protocols described above, immunoglobulin gamma VH regions were amplified and cloned into a PDV-C05 vector already containing a VkIII light chain fragment. This resulted in a non-immunized, naïve library expressing scFv with a fixed VkIII light chain variable region and having a size of approximately 10×10⁶.

### Example 14

Selection of Phage Carrying Single Chain Fv Fragments Specifically Recognizing SARS-CoV from Naïve and Immune Phage Display Libraries

[0181] Antibody fragments were selected essentially as described previously (see Example 1). For the selections described below an UV-inactivated SARS-CoV preparation was used (for preparation thereof see Example 9). In contrast to the selections described in Example 1, no pre-subtraction using heat-inactivated fetal bovine serum coated Maxisorp™ tubes (Nunc) was performed. To the SARS-CoV coated tubes, 500 μl (approximately 10¹³ cfu) of a naïve or an immune phage display library expressing single chain Fv fragments (scFvs) (see Example 13 for the construction of these libraries), one volume of 4% PBS-FM and Tween-20 to a final concentration of 0.05% was added.

[0182] For the naïve phage display library selections, binding was allowed to proceed for 1 hour on a slowly rotating wheel at 37° C. followed by an incubation of 30 minutes without agitation. The tubes were emptied and washed as follows: first round, ten times with PBS containing 0.05% Tween-20 (PBST) and ten times with PBS; second round, 15 times with PBST and ten times with PBS; third round 15 times with PBST and 15 times with PBS.

[0183] For the immune phage display library selections which consisted of a single round only, binding was allowed to proceed at 37° C. or room temperature as described above. The following selections and washes were performed: incubation at 37° C., washing five times with PBST and five times with PBS; incubation at 37° C., washing ten times with PBST and ten times with PBS; incubation at room temperature, washing ten times with PBST and ten times with PBS. Bound phages were eluted and processed as described in Example 1. Phages derived from individual colonies were tested in ELISA for binding activity to SARS-CoV coated to 96-well plates.

[0184] In the selections from the naïve phage display library the phage antibodies called SC03-019 and SC03-059 were obtained. In the selections from the immune phage display library the phage antibodies called SC03-020, SC03-021, SC03-022, SC03-023, SC03-024, SC03-025, SC03-026, SC03-027, SC03-029, SC03-030, SC03-031, SC03-032, SC03-033, SC03-034, SC03-035, SC03-036, SC03-037, SC03-038, SC03-039, SC03-040, SC03-041, SC03-042, SC03-043, SC03-044, SC03-045, SC03-046, SC03-047, SC03-048, SC03-049, SC03-050, SC03-051, SC03-052, SC03-053, SC03-054, SC03-055, SC03-056, SC03-057 and SC03-058 were obtained.

### Example 15

Validation of the SARS-CoV Specific Single-Chain Phage Antibodies Derived from the Naïve and Immune Phage Display Library

[0185] Selected single-chain phage antibodies that were obtained in the screens described in Example 14 were validated in ELISA for specificity, i.e., binding to the SARS-CoV preparation mentioned in Example 14, essentially as described in Example 2. In contrast to Example 2, the single-chain phage antibodies were not tested for binding to 10% FBS.

[0186] As shown in Table 17, the selected phage antibodies called SC03-019, SC03-020, SC03-021, SC03-022, SC03-023, SC03-024, SC03-025, SC03-026, SC03-027, SC03-029, SC03-030, SC03-031, SC03-032, SC03-033, SC03-034, SC03-035, SC03-036, SC03-037, SC03-038, SC03-039, SC03-040, SC03-041, SC03-042, SC03-043, SC03-044, SC03-045, SC03-046, SC03-047, SC03-048, SC03-049, SC03-050, SC03-051, SC03-052, SC03-053, SC03-054, SC03-055, SC03-056, SC03-057, SC03-058 and SC03-059 displayed significant binding to the immobilized SARS-CoV preparation. As a control, the procedure was performed simultaneously using no single-chain phage antibody.

### Example 16

Characterization of the scFvs Specific for SARS-CoV Derived from the Naïve and Immune Phage Display Library

[0187] From the selected specific single chain phage antibody (scFv) clones (see Example 14) plasmid DNA was obtained and nucleotide sequences were determined according to standard techniques. The nucleotide sequences of the scFvs (including restriction sites for cloning) called SC03-019, SC03-020, SC03-021, SC03-022, SC03-023, SC03-024, SC03-025, SC03-026, SC03-027, SC03-029, SC03-030, SC03-031, SC03-032, SC03-033, SC03-034, SC03-035, SC03-036, SC03-037, SC03-038, SC03-039, SC03-040, SC03-041, SC03-042, SC03-043, SC03-044, SC03-045, SC03-046, SC03-047, SC03-048, SC03-049, SC03-050, SC03-051, SC03-052, SC03-053, SC03-054, SC03-055, SC03-056, SC03-057, SC03-058 and SC03-059 are shown in SEQ ID NO:211, SEQ ID NO:213, SEQ ID NO:215, SEQ ID NO:217, SEQ ID NO:219, SEQ ID NO:221, SEQ ID NO:223, SEQ ID NO:225, SEQ ID NO:227, SEQ ID NO:229, SEQ ID NO:231, SEQ ID NO:233, SEQ ID NO:235, SEQ ID NO:237, SEQ ID NO:239, SEQ ID NO:241, SEQ ID NO:243, SEQ ID NO:245, SEQ ID NO:247, SEQ ID NO:249, SEQ ID NO:251, SEQ ID NO:253, SEQ ID NO:255, SEQ ID NO:257, SEQ ID NO:259, SEQ ID NO:261, SEQ ID NO:263, SEQ ID NO:265, SEQ ID NO:267, SEQ ID NO:269, SEQ ID NO:271, SEQ ID NO:273, SEQ ID NO:275, SEQ ID NO:277, SEQ ID NO:279, SEQ ID NO:281, SEQ ID NO:283, SEQ ID NO:285, SEQ ID NO:287 and SEQ ID NO:289, respectively.

[0188] The amino acid sequences of the scFvs called SC03-019, SC03-020, SC03-021, SC03-022, SC03-023, SC03-024, SC03-025, SC03-026, SC03-027, SC03-029, SC03-030, SC03-031, SC03-032, SC03-033, SC03-034, SC03-035, SC03-036, SC03-037, SC03-038, SC03-039, SC03-040, SC03-041, SC03-042, SC03-043, SC03-044, SC03-045, SC03-046, SC03-047, SC03-048, SC03-049, SC03-050, SC03-051, SC03-052, SC03-053, SC03-054, SC03-055, SC03-056, SC03-057, SC03-058 and SC03-059 are shown in SEQ ID NO:212, SEQ ID NO:214, SEQ ID NO:216, SEQ ID NO:218, SEQ ID NO:220, SEQ ID NO:222, SEQ ID NO:224, SEQ ID NO:226, SEQ ID NO:228, SEQ ID NO:230, SEQ ID NO:232, SEQ ID NO:234, SEQ ID NO:236, SEQ ID NO:238, SEQ ID NO:240, SEQ ID NO:242, SEQ ID NO:244, SEQ ID NO:246, SEQ ID NO:248, SEQ ID NO:250, SEQ ID NO:252, SEQ ID NO:254, SEQ ID NO:256, SEQ ID NO:258, SEQ ID NO:260, SEQ ID NO:262, SEQ ID NO:264, SEQ ID NO:266, SEQ ID NO:268, SEQ ID NO:270, SEQ ID NO:272, SEQ ID NO:274, SEQ ID NO:276, SEQ ID NO:278, SEQ ID NO:280, SEQ ID NO:282, SEQ ID NO:284, SEQ ID NO:286, SEQ ID NO:288 and SEQ ID NO:290, respectively.

[0189] The VH and VL gene identity (see I. M. Tomlinson, S. C. Williams, O. Ignatovitch, S. J. Corbett, G. Winter, V-BASE Sequence Directory, Cambridge United Kingdom: MRC Centre for Protein Engineering (1997)) and heavy chain CDR3 compositions of the scFvs specifically binding the SARS-CoV preparation are depicted in Table 18.

### Example 17

In Vivo Experiment in Ferrets with Recombinant Human Anti-SARS-CoV Antibodies Having Neutralizing Activity

[0190] The experiment was performed to investigate the neutralizing capacity of the anti-SARS-CoV monoclonal antibodies of the invention in vivo essentially as described by Emini et al. (1990). Briefly, the human monoclonal anti-SARS-CoV antibody 03-014 and the control anti-Epcam antibody 02-027 were pre-incubated in vitro with two different titers (10³ and 10⁴ TCID₅₀) of the SARS-CoV strain SCV-P4 (5688) (obtained from patient 5688, see above). Antibody concentrations used were extrapolated from the concentration of antibody needed to neutralize 100TCID₅₀ of virus in a volume of 100 μl (i.e., 6.25 μg/ml; see in vitro neutralization data in Example 7) and multiplied by twenty (i.e., 0.13 mg/ml for 1000TCID₅₀, 1.3 mg/ml for 10,000TCID₅₀). The virus/antibody mixtures obtained were used to infect ferrets via the intratracheal route (Fouchier et al. 2003). Cell cultures of Vero 118 cells were inoculated in parallel to verify the in vitro neutralizing activity of the monoclonal antibody 03-014 and the expected infectivity of the virus in case of pre-incubation with the control antibody. Ferrets were monitored for signs of disease and shedding of virus (RT-PCR) and ultimately sacrificed and examined by histopathology.

[0191] High dose and low dose solutions of the monoclonal antibody 03-014 and the control antibody were prepared as follows. The working solution of the monoclonal antibody 03-014 had a concentration of 1.44 mg/ml. 4.87 ml of this working solution was brought into a 15 ml tube (high dose solution, 1.44 mg/ml final concentration). To obtain the low dose solution, 541 μl of the working solution was added to 2.46 ml PBS (low dose solution, 0.26 mg/ml final concentration) and mixed well. 2.7 ml of this low dose solution was brought into a 15 ml tube.

[0192] The starting solution of the control antibody had a concentration of 3.90 mg/ml. 2.10 ml of this starting solution was added to 3.58 ml PBS to obtain a working solution with a final concentration of 1.44 mg/ml. 4.87 ml of this working solution was brought into a 15 ml tube (high dose solution, 1.44 mg/ml final concentration). To obtain the low dose solution, 541 μl of the working solution was added to 2.46 ml PBS (low dose solution, 0.26 mg/ml final concentration) and mixed well. 2.7 ml of this low dose solution was brought into a 15 ml tube.

[0193] After preparation of the high dose and low dose solutions of the monoclonal antibodies, the high dose and low dose solution of the SARS-CoV were prepared. The starting solution of the SARS-CoV had a concentration of 10⁷ TCID₅₀/ml. The starting solution was thawed at 37° C. and 100 μl of this solution was added to 900 μl PBS and mixed well. The working solution thus obtained had a concentration of 10⁶ TCID₅₀/ml.

[0194] To obtain a high dose SARS-CoV solution 200 μl working solution was added to 1.8 ml PBS and mixed well (high dose SARS-CoV solution, 100,000 TCID₅₀/ml). To obtain a low dose SARS-CoV solution 200 μl high dose solution was added to 1.8 ml PBS and mixed well. After that, the thus obtained diluted high dose solution was further diluted by adding 1.2 ml of this diluted high dose solution to 4.8 ml PBS and mixing (low dose SARS-CoV solution, 2,000 TCID₅₀/ml).

[0195] Next, the high dose and low dose solutions of the monoclonal antibodies were mixed with the high and low dose SARS-CoV solutions at 37° C. for one hour. The following groups were prepared.

[0196] Group 1: 2.7 ml low dose SARS-CoV solution was added to 2.7 ml low dose solution of the monoclonal antibody 03-014 and mixed well (final concentration of SARS-CoV was 1,000 TCID₅₀/ml; final concentration of monoclonal antibody 03-014 0.13 mg/ml; total volume 5.4 ml).

[0197] Group 2: 0.54 ml high dose SARS-CoV solution was added to 4.87 ml high dose solution of the monoclonal antibody 03-014 and mixed well (final concentration of SARS-CoV was 10,000 TCID₅₀/ml; final concentration of monoclonal antibody 03-014 1.3 mg/ml; total volume 5.4 ml).

[0198] Group 3: 2.7 ml low dose SARS-CoV solution was added to 2.7 ml low dose solution of the monoclonal control antibody and mixed well (final concentration of SARS-CoV was 1,000 TCID₅₀/ml; final concentration of monoclonal control antibody 0.13 mg/ml; total volume 5.4 ml).

[0199] Group 4: 0.54 ml high dose SARS-CoV solution was added to 4.87 ml high dose solution of the monoclonal control antibody and mixed well (final concentration of SARS-CoV was 10,000 TCID₅₀/ml; final concentration of monoclonal control antibody 1.3 mg/ml; total volume 5.4 ml).

[0200] 1.1 ml of the solution of each of the four groups was removed for inoculation of Vero 118 cell cultures. One ml of the solution of each of the four groups was added to a separate well of substrate plates (each plate containing six wells). Each well contained an 80% monolayer of Vero 118 cells. The monolayers were prepared by trypsinizing Vero 118 cells, diluting them in DMEM with 5% FBS, seeding 2*10⁶ Vero 118 cells per separate well and incubating the cells for 16 to 20 hours at 37° C. with 2 ml DMEM containing sodium bicarbonate 0.75%, L-glutamine 2 mM and penicillin/streptomycin (10 U/ml). The plates with the above solutions were incubated overnight at 37° C. The medium was replaced by fresh medium and the plates were incubated for a further three to five days at 37° C. and monitored for CPE.

[0201] To each of the remaining amounts (4.3 ml) of each of the four groups 8.6 ml PBS was added. Prior to any handling or sampling, the animals were anesthetized by means of light ketamine (2.5 mg/kg) and domitor (0.1 ml/kg), followed by antisedan (0.05 ml/kg). Before inoculation, from each ferret a nasal swab was taken (day 0). Each ferret was intratracheally inoculated with 3 ml of the respective solutions as indicated in the scheme shown in Table 19. Nasal swabs alone were taken from each ferret as indicated in the scheme shown in Table 19 (day 2). Animals were checked every day for clinical symptoms such as respiratory problems, erythema and lethargy. Animals were weighed every other day. From each ferret nasal and pharyngeal swabs were taken as indicated in the scheme shown in Table 19 (day 4 or 7). Swabs were preserved in standard virus transport medium and stored at −80° C. Ferrets were euthanized by means of total exsanguination under full anesthesia by means of ketamine (5 mg/kg) and domitor (0.1 ml/kg) as indicated in the scheme shown in Table 19 (day 4 or 7). Next, the samples were analyzed by RT-PCR with primers and probes specific for the nucleoprotein (NP) gene of SARS-CoV to quantify SARS-CoV in lung tissues as described in Kuiken et al. 2003.

[0202] As shown in FIG. 18, ferrets inoculated with the virus-control antibody mixture displayed dose-dependent SARS-CoV excretion at two, four and seven days after inoculum administration. In contrast, in the animals inoculated with the virus-03-014 antibody mixture no SARS-CoV could be detected at any time point, indicating that no virus had disseminated from the site of inoculation.

[0203] SARS-CoV titers in the lung were obtained using an in vitro virus titration assay. Lung samples were collected and weighed and transferred to a 5 ml tubes containing 1 ml RPMI1640 medium. The samples were transferred to ice, homogenized and cellular debris was pelleted by centrifugation. From the supernatant ten-fold serial dilutions were prepared starting with a dilution of 1:10. 100 μl of the homogenate dilutions were added to 80% confluent monolayers of Vero 118 cells in a 96-well plate. The cells were incubated for five days and the occurrence cytopathogenic effect (CPE) was scored. SARS-CoV lung titers were expressed as TCID50/ml and were calculated according to the Reed and Muench method.

[0204] As shown in FIG. 19, ferrets inoculated with the virus-control antibody mixture displayed equal high SARS-CoV titers (10E6.5/ml lung homogenate) at day 4 independent of the virus challenge dose. At day 7, the virus load in the lungs of both control groups was significantly lower (10E4/ml lung homogenate), suggesting that the animals are capable of clearing the virus. Strikingly, very low amounts of SARS-CoV were detected in both the high and low dose groups inoculated with the virus-03-014 antibody mixture (10E1.5/ml lung homogenate is the detection limit of the assay used).

[0205] The analysis of the pathology in the ferret lungs was performed according to the following procedure. Necropsies were done according to a standard protocol; one lung of each ferret was inflated with 10% neutral-buffered formalin by intrabronchial intubation and suspended in 10% neutral-buffered formalin overnight. Samples were collected in a standard manner (one from the cranial part of the lung, one from the medial and two from the caudal part), embedded in paraffin, cut at 5 μm and stained with hematoxylin and eosin (HE). For semi-quantitative assessment of SARS-CoV-infection-associated inflammation in the lung, each HE-stained section was examined for inflammatory foci by light microscopy using a 2.5× objective. If any suspect lesions were seen, they were examined at higher power to determine whether typical characteristics are present (intra-alveolar oedema, neutrophils and macrophages in alveolar lumina, type 2 pneumocyte hyperplasia). Lung sections were scored as followed: −, no SARS lesions; +, mild SARS lesions; ++, moderate SARS lesions; +++, marked SARS lesions. The final score for each animal is the cumulative score of two lung sections. Sections were examined in a blinded manner.

[0206] As shown in FIG. 20, ferrets inoculated with the virus-control antibody mixture displayed significant lung pathology at day 4 independent of the virus challenge dose. At day 7, the pathological signs in the lungs of the low dose control group had disappeared, demonstrating that these animals had the capacity to recover from the disease. In both high and low dose groups inoculated with the virus-03-014 antibody mixture no signs of pathology were observed at both four and seven days post treatment indicating that the very low amount of virus present in the lungs did not induce tissue damage.

### Example 18

Efficacy of the Human anti-SARS-CoV Monoclonal Antibodies Upon Passive Transfer and SARS-CoV Challenge in Ferrets

[0207] To address whether the human anti-SARS-CoV monoclonal antibodies can be efficacious in a prophylactic setting a SARS-CoV challenge experiment has been performed in ferrets. One day prior to the SARS-CoV challenge ferrets were administered 10 mg/kg of monoclonal 03-014-IgG1 antibody intraperitoneally (i.p.). Prior to all experimental procedures the animals were anesthetized as described supra. Two groups of four animals were treated with either a human monoclonal control IgG1 antibody (02-027, anti-Epcam antibody) or with the monoclonal anti-SARS-CoV 03-014 IgG1 antibody. The anti-SARS-CoV 03-014 antibody (concentration 1.23 mg/ml) was used undiluted for i.p. administration. The 02-027 control IgG1 antibody (concentration 3.9 mg/ml) was diluted 1:2 in PBS to achieve a final concentration of 1.3 mg/ml. The volume needed for the injection of the 10 mg/kg dose was based on the weight of the individual ferrets and varied between 6.5 and 8 ml. The antibodies were injected at ambient temperature. Prior to the antibody transfer and prior to the SARS-CoV challenge, serum samples were obtained from each animal to assess the SARS-CoV neutralization titer as described before. All animals were challenged with 10⁴ TCID50 of the SARS-CoV strain SCV-P4 (5688). To this purpose the 5866 SARS-CoV virus stock (concentration: 10⁷ TCID50/ml) was thawed and 100 μl of the virus stock was added to 900 μl PBS (at room temperature) to obtain a working virus stock of 10⁶ TCID50/ml. To obtain the final solution containing the challenge dose of 10⁴ TCID50 per 3 ml challenge dose, 100 μl virus working stock was added to 30 ml PBS (at room temperature). Each ferret was inoculated intratracheally with 3 ml of virus mixture as described supra. Serum, pharyngeal swab and tissue samples were obtained according to Table 20. SARS-CoV excretion in pharyngeal swabs, SARS-CoV titers in lung tissue and lung pathology were analyzed as described supra.

[0208] FIG. 21 shows that all control animals had high pulmonary SCV titers with a mean TCID50 in lung homogenates of 6.0 logs (SD 0.3), as compared to 2.7 logs (SD 0.5) in the 03-014 group, i.e., a difference in TCID50 of 3.3 logs (95% CI: 2.5-4.1 logs; p<=0.001). The data were compared using the Students's T-test, differences were considered significant at p-value less than 0.05.

[0209] In the control group, shedding of SARS-CoV in the throat was apparent two and four days after challenge. By contrast, pharyngeal excretion was completely abolished in three of the 03-014-treated animals (see FIG. 22). However, in one animal SARS-CoV excretion was comparable to the levels observed in the control group. Determination of the human IgG1 serum level of this ferret prior to challenge, revealed that this animal had acquired a 03-014 serum concentration below 5 μg/ml, whereas in the other three animals serum IgG1 levels ranged from 65-84 μg/ml, suggesting inappropriate antibody administration. This finding was considered an artifact of the intraperitoneal antibody application procedure. In agreement with this, a declined serum neutralizing titer could be demonstrated in this animal compared to the three animals that did not display pharyngeal SARS-CoV excretion. Neutralizing serum titers in this animal were less than half of those in the other animals on day 0 (titer of 5 against 100 TCID50), and were not detectable on day 2 after injection, compared with a titer of 5 to 10 against 100 TCID50 in the other animals on day 2.

[0210] Importantly, the differences in both pharyngeal and pulmonary viral titers between the control group and the 03-014 group were accompanied by a complete protection from macroscopic lung pathology in the group treated with 03-014 compared to the control group, who all showed multifocal lesions (p=0.029). Upon microscopic analysis, these lesions showed alveolar changes resembling diffuse alveolar damage as well as peribronchial, peribrochiolar, and perivascular lymphocytic cuffing.

[0211] Taken together, these results demonstrate that passive transfer of the 03-014 anti-SARS-CoV antibody was able to abolish SARS-CoV induced pulmonary lesions as well as SARS-CoV excretion in animals that had obtained sufficient 03-014 IgG serum titers (see Ter Meulen et al. 2004).

### Example 19

Characterization of Anti-SARS-CoV IgG Antibodies by Electron Microscopy

[0212] Supernatants of SARS-CoV producing Vero cells were harvested 24 hours p.i. and used directly for indirect, two-step immuno-gold-labeling. SARS-CoV was adsorbed to carbon- and Pioloform-coated copper grids. After two washing steps with blocking buffer (PBS comprising 0.1% bovine serum albumin), the grids were incubated with the human monoclonal control IgG1 antibody (02-027, anti-Epcam antibody) or with the monoclonal anti-SARS-CoV 03-014 IgG1 antibody by floating on respective droplets for 30 minutes at room temperature. Next, surplus antibody was removed using a strip of filter paper and two washing steps on blocking buffer. Bound monoclonal antibodies were detected by incubation on droplets of anti-hu-IgG-gold-5 nm conjugates (British Biocell Corp). The grids were negative contrasted with 1% uranyl acetate and evaluated at a ZEISS EM 10 A transmission electron microscope.

[0213] Incubation with the monoclonal anti-SARS-CoV 03-014 IgG1 antibody lead to a dense gold-label of the outer peplomer region of the SARS-CoV (see FIG. 23, section a), while incubation with the human monoclonal control IgG1 antibody did not induce any label (see FIG. 23, section b).

[0214] In a similar way, ultra-thin sections of Vero cells infected with SARS-CoV were analyzed by electron microscopy. In FIG. 24A unstained ultra-thin sections of Vero cells infected with SARS-CoV are shown. In FIG. 24B the sections were stained with the human monoclonal control IgG1 antibody (02-027, anti-Epcam antibody), while in FIGS. 24C and 24D the sections were stained with the monoclonal anti-SARS-CoV IgG1 antibodies 03-009 and 03-018, respectively. The localization of the gold label clearly indicates that the nucleocapsid protein is retained within the virion.

### Example 20

Construction and Evaluation of Binding of the Monoclonal Anti-SARS-CoV Antibodies to Variant S318-510 Fragments

[0215] The diversity within the region 318-510 of the S protein was determined as follows. A list containing more than 146 genomes or genes encoding complete human SARS-CoV or fragments thereof was compiled. In 114 cases, an open reading frame encoding for full-length spike (S) protein was identified. Alignment of the spike amino acid residues 318-510 revealed 30 spike proteins, in which the region 318-510 was not identical to that of the spike protein of strain Frankfurt 1 (see Genbank accession number AY291315), which was used herein. The mutations, strains and Genbank numbers are depicted in Table 21. To investigate if 03-014 bound the S protein of all currently known human SARS-CoV isolates, eight recombinant spike fragments harboring the different amino acid substitutions as shown in Table 21 were generated. To this end, the above substitutions were introduced in the pHAVT20/myc-His A S318-510 vector using the Stratagene's QuikChange II site-directed mutagenesis kit according to the manufacturer's instructions. In case a sequence contained multiple amino acid substitutions, the process of mutagenesis, sequence analysis and confirmation was repeated for every single substitution. To rule out the introduction of additional mutations in the plasmid outside the gene of interest, the mutated (592 bp EcoRI-XbaI) fragment was recloned in EcoRI-XbaI cut pHAVT20/myc-His A. The resulting plasmids were transfected into 293T cells, and binding of 03-014 was evaluated by means of ELISA as described in Example 12. In addition, binding of HRP-conjugated monoclonal anti-His6 antibody (Roche) to each mutant was evaluated essentially as described above. Binding of anti-His6 and 03-014 to the wild-type S318-510 fragment derived from the Frankfurt 1 strain was set at 100%. Binding of the monoclonal anti-His6 antibody and 03-014 to the mutated S318-510 fragments was expressed as percentage of binding compared to the wild-type S318-510 fragment.

[0216] As shown in FIG. 25, the monoclonal anti-His 6 antibody and 03-014 were capable of binding all variant S318-510 fragments to a similar extent as the wild-type (non-mutated) S318-510 fragment, with the exception that the binding of monoclonal antibody 03-014 to variant F (N479S substitution) was approximately 50% of the binding to the other variant fragments and the wild-type S318-510 fragment. This indicates that residue N479 is involved in binding of 03-014, either directly by being part of the binding site of 03-014 or indirectly by being important for the correct conformation of the binding site of 03-014 within the spike protein. In conclusion, 03-014 is capable of binding the S318-510 region of the Frankfurt 1 strain and also of recombinant S318-510 fragments harboring mutations that can be found in the S318-510 region of the human SARS-CoV isolates described in Table 21. This suggests that 03-014 can be used to neutralize all currently known human SARS-CoV isolates.

### Example 21

Screening Assay for Breadth of Protection of the Monoclonal Anti-SARS-CoV Antibodies

[0217] Different SARS-CoV strains were used to evaluate the potency and breadth of protection of the anti-SARS-CoV antibodies. The SARS-CoV strains HKU-36, HKU-39849, HKU-66, and HKU-61567 were passaged on FRhK-4 cells for two or three times before testing (see Table 22). Strain HKU-61644 was passaged on Vero cells and tested after passage 1 and 15. The SARS-CoV neutralization assay was performed on FRhK-4 cells as follows. A 500 μl 100 μg/ml stock solution of antibody was prepared in maintenance medium (MM, MEM supplemented with 1% fetal calf serum). From this stock solution, two-fold serial dilutions were prepared. 220 μl 100 μg/ml stock solution was added in duplo in a 96-well plate from which 110 μl was taken and mixed with 110 μl MM in each of the nine subsequent wells. 110 μl of the tenth well was discarded, which resulted in ten wells containing 110 μl 0.2-100 μg/ml antibody. 110 μl of the antibody dilution was mixed with 110 μl of the different SARS-CoV isolates at a concentration of 2000 TCID50/ml with the titer calculated according to the method of Reed and Muench. At this stage, in a 220 μl volume, antibody concentrations varied from 0.1 to 50 μg/ml in the presence of 1000 TCID50/ml SARS-CoV. The 96-well plate containing the antibody virus mixtures was preincubated for one to two hours at 37° C. 100 μl of the virus-antibody mixtures were added in quadruplicate to wells from a second 96-well tissue culture plate containing confluent FRhK-4 cells in 100 μl MM and incubated at 37° C. During this final incubation step, 100 TCID50 of SARS-CoV was present in the presence of antibody concentrations varying from 0.05 to 25 μg/ml. The cells were cultured at 37° C. and observed for the development of CPE at 72 and 96 hours. CPE is compared to a positive control (SARS-CoV inoculated cells) and a negative control (cells incubated with MM only). The antibody neutralization titer was determined as the concentration of antibody which gives 100% protection of the quadruplicate cell cultures. The monoclonal anti-SARS-CoV antibody 03-014 completely neutralized 100 TCID50 of all tested SARS-CoV isolates at a concentration of 12.5 μg/ml (see Table 22). This indicates that antibody 03-014 is able to neutralize a variety of SARS-CoV isolates.

TABLE 1
Binding of single-chain (scFv) phage antibodies to
a SARS-CoV preparation (Frankfurt 1
strain) and to FBS as measured by ELISA.

| | SARS-CoV preparation | FBS |
|---|---|---|
| Name phage antibody | (OD492 nm) | (OD492 nm) |
| SC03-001 | 0.979 | 0.142 |
| SC03-002 | 0.841 | 0.091 |
| SC03-003 | 0.192 | 0.092 |
| SC03-005 | 0.869 | 0.098 |
| SC03-006 | 1.056 | 0.086 |
| SC03-007 | 0.876 | 0.096 |
| SC03-008 | 0.358 | 0.114 |
| SC03-009 | 0.760 | 0.087 |
| SC03-010 | 0.327 | 0.082 |
| SC03-012 | 0.495 | 0.100 |
| SC03-013 | 0.979 | 0.101 |
| SC03-014 | 0.917 | 0.089 |
| SC03-015 | 0.796 | 0.077 |
| Anti-thyroglobulin (SC02-006) | 0.108 | 0.090 |
| No phage antibody | 0.072 | 0.083 |

[0218] TABLE 2
Binding of alternatively selected single-chain (scFv)
phage antibodies to a SARS-CoV preparation
(Frankfurt 1 strain) and to FBS as measured by ELISA.

| | SARS-CoV preparation | FBS |
|---|---|---|
| Name phage antibody | (OD492 nm) | (OD492 nm) |
| SC03-016 | 0.313 | 0.205 |
| SC03-017 | 0.106 | 0.059 |
| SC03-018 | 1.523 | 0.072 |
| Anti-CD46 (SC02-300) | 0.171 | 0.070 |
| No phage antibody | 0.081 | 0.045 |

[0219] TABLE 3

Data of the single-chain
Fvs capable of binding SARS-CoV.

| | SEQ ID NO | SEQ ID NO | | | |
|---|---|---|---|---|---|
| | of nucleotide | of amino acid | | | |
| Name scFv | sequence | sequence | HCDR3 | V_{H}-germline | V_{L}-germline |
| SC03-001 | 46 | 47 | HRFRHVFDY | V_{H}3 V_{H}3-38 | VₖI DPK9 |
| | | | | | (02/012) |
| SC03-002 | 48 | 49 | YYSRSLKAFDY | V_{H}3 DP29 | VₖI DPK9 |
| | | | | (V_{H}3-72) | (02/012) |
| SC03-003 | 50 | 51 | RSYFRRFDY | V_{H}3 DP47 | VₖI DPK9 |
| | | | | (V_{H}3-23) | (02/012) |
| SC03-004 | 89 | 90 | DGSRFPARFDY | V_{H}3 (V_{H}3-73) | VₖI DPK9 |
| | | | | | (02/012) |
| SC03-005 | 52 | 53 | GGGRPYNPFDY | V_{H}3 V_{H}3-38 | VₖI DPK9 |
| | | | | | (02/012) |
| SC03-006 | 54 | 55 | DGSPRTPSFDY | V_{H}3 DP49 | VₖI DPK4 |
| | | | | (V_{H}3-30) | (A20) |
| SC03-007 | 56 | 57 | GYWTSLTGFDY | V_{H}3 DP49 | VₖI DPK9 |
| | | | | (V_{H}3-30) | (02/012) |
| SC03-008 | 58 | 59 | RVRPRRFDY | V_{H}3 DP47 | VₖI DPK9 |
| | | | | (V_{H}3-23) | (02/012) |
| SC03-009 | 60 | 61 | GLFMVTTYAFD | V_{H}3 DP47 | VₖI DPK9 |
| | | | Y | (V_{H}3-23) | (02/012) |
| SC03-010 | 62 | 63 | GGGLPYLSFDY | V_{H}3 V_{H}3-38 | VₖI DPK9 |
| | | | | | (02/012) |
| SC03-012 | 64 | 65 | MFRKSSFDS | V_{H}1 DP14 | V_{L}III |
| | | | | (V_{H}1-18) | DPL16 |
| | | | | | (2-13, 31) |
| SC03-013 | 66 | 67 | GLTPLYFDY | V_{H}3 DP29 | VₖI DPK9 |
| | | | | (V_{H}3-72) | (02/012) |
| SC03-014 | 68 | 69 | GISPFYFDY | V_{H}3 DP29 | VₖI DPK9 |
| | | | | (V_{H}3-72) | (02/012) |
| SC03-015 | 70 | 71 | GLSLRP | V_{H}3 DP32 | V_{L}III |
| | | | | (V_{H}3-20) | DPL16 |
| | | | | | (2-13, 31) |
| SC03-016 | 91 | 92 | YGSAYRPPFDY | V_{H}3 (V_{H}3-49) | VₖI DPK9 |
| | | | | | (02/012) |
| SC03-017 | 93 | 94 | SRSAGFFDY | V_{H}4 DP66 | VₖIII (L6) |
| | | | | (V_{H}4-61) | |
| SC03-018 | 95 | 96 | FNPFTSFDY | V_{H}3 DP47 | VₖI DPK9 |
| | | | | (V_{H}3-23) | (02/012) |

[0220] TABLE 4
Data of assay for SARS-CoV (strains Frankfurt 1
and Frankfurt 2) neutralising activity of bivalent scFvs.

| | | Neutralization | Neutralization |
|---|---|---|---|
| | OD 280 | titer for | titer for |
| Name bivalent scFv | (mg/ml) | Frankfurt 1 strain | Frankfurt 2 strain |
| pyBi03-001C02 | 0.0238 | <20 | <20 |
| pyBi03-002C02 | 0.0518 | <20 | <20 |
| pyBi03-003C02 | 0.0406 | <20 | <20 |
| pyBi03-005C02 | 0.0658 | <20 | <20 |
| pyBi03-006C02 | 0.0343 | <20 | <20 |
| pyBi03-007C02 | 0.0280 | <20 | <20 |
| pyBi03-008C02 | 0.0210 | <20 | <20 |
| pyBi03-009C02 | 0.0434 | <20 | <20 |
| pyBi03-010C02 | 0.0567 | <20 | <20 |
| pyBi03-012C02 | 0.0168 | <20 | <20 |
| pyBi03-013C02 | 0.1743 | 160 | 80 |
| pyBi03-014C02 | 0.1561 | 80 | 80 |
| pyBi03-015C02 | 0.4816 | <20 | <20 |
| pyBi02-148C02 | 0.0763 | <20 | <20 |
| pyBi02-006C02 | 0.0791 | <20 | <20 |
| Serum of SARS-patient | | 320 | 160 |

[0221] TABLE 5
Binding of recombinant human anti-SARS-antibodies
to SARS-infected cells as measured
by indirect immunofluorescence staining

| Antibody | Staining |
|---|---|
| Negative control | − |
| Positive control | + |
| 03-014 | + |
| 03-018 | + |

− indicates no staining of SARS-CoV transfected cells
+ indicates staining of SARS-CoV transfected cells

[0222] TABLE 6
Binding of antibody 03-018 to linear and looped/cyclic peptides of the N
protein of SARS-CoV Urbani.

| | Antibody 03-018 | Antibody 03-018 looped |
|---|---|---|
| Peptides of N protein | linear peptides | peptides |
| MSDNGPQSNQRSAPR | 0.1 | 0.3 |
| SDNGPQSNQRSAPRI | 0.0 | 0.2 |
| DNGPQSNQRSAPRIT | 0.2 | 0.3 |
| [chemical structure] | [chemical structure] | [chemical structure] |
| [chemical structure] | [chemical structure] | [chemical structure] |
| [chemical structure] | [chemical structure] | [chemical structure] |
| [chemical structure] | [chemical structure] | [chemical structure] |
| [chemical structure] | [chemical structure] | [chemical structure] |
| [chemical structure] | [chemical structure] | [chemical structure] |
| [chemical structure] | [chemical structure] | [chemical structure] |
| [chemical structure] | [chemical structure] | [chemical structure] |
| [chemical structure] | [chemical structure] | [chemical structure] |
| [chemical structure] | [chemical structure] | [chemical structure] |
| [chemical structure] | [chemical structure] | [chemical structure] |
| [chemical structure] | [chemical structure] | [chemical structure] |
| [chemical structure] | [chemical structure] | [chemical structure] |
| TFGGPTDSTDNNQNG | 0.1 | 0.2 |
| FGGPTDSTDNNQNGG | 0.1 | 0.2 |
| GGPTDSTDNNQNGGR | 0.1 | 0.2 |
| GPTDSTDNNQNGGRN | 0.2 | 0.2 |
| PTDSTDNNQNGGRNG | 0.1 | 0.2 |
| TDSTDNNQNGGRNGA | 0.2 | 0.2 |
| DSTDNNQNGGRNGAR | 0.2 | 0.3 |
| STDNNQNGGRNGARP | 0.2 | 0.2 |
| TDNNQNGGRNGARPK | 0.2 | 0.2 |
| DNNQNGGRNGARPKQ | 0.2 | 0.3 |
| NNQNGGRNGARPKQR | 0.2 | 0.2 |
| NQNGGRNGARPKQRR | 0.2 | 0.2 |
| QNGGRNGARPKQRRP | 0.2 | 0.3 |
| NGGRNGARPKQRRPQ | 0.2 | 0.3 |
| GGRNGARPKQRRPQG | 0.2 | 0.2 |
| GRNGARPKQRRPQGL | 0.1 | 0.2 |
| RNGARPKQRRPQGLP | 0.1 | 0.3 |
| NGARPKQRRPQGLPN | 0.1 | 0.3 |
| GARPKQRRPQGLPNN | 0.1 | 0.2 |
| ARPKQRRPQGLPNNT | 0.1 | 0.2 |
| RPKQRRPQGLPNNTA | 0.1 | 0.2 |
| PKQRRPQGLPNNTAS | 0.2 | 0.3 |
| KQRRPQGLPNNTASW | 0.1 | 0.2 |
| QRRPQGLPNNTASWF | 0.1 | 0.2 |
| RRPQGLPNNTASWFT | 0.1 | 0.2 |
| RPQGLPNNTASWFTA | 0.1 | 0.2 |
| PQGLPNNTASWFTAL | 0.1 | 0.3 |
| QGLPNNTASWFTALT | 0.1 | 0.3 |
| GLPNNTASWFTALTQ | 0.1 | 0.3 |
| LPNNTASWFTALTQH | 0.1 | 0.3 |
| PNNTASWFTALTQHG | 0.1 | 0.3 |
| NNTASWFTALTQHGK | 0.1 | 0.2 |
| NTASWFTALTQHGKE | 0.1 | 0.2 |
| TASWFTALTQHGKEE | 0.1 | 0.2 |
| ASWFTALTQHGKEEL | 0.1 | 0.2 |
| SWFTALTQHGKEELR | 0.1 | 0.2 |
| WFTALTQHGKEELRF | 0.1 | 0.2 |
| FTALTQHGKEELRFP | 0.1 | 0.2 |
| TALTQHGKEELRFPR | 0.1 | 0.3 |
| ALTQHGKEELRFPRG | 0.2 | 0.2 |
| LTQHGKEELRFPRGQ | 0.1 | 0.2 |
| TQHGKEELRFPRGQG | 0.1 | 0.2 |
| QHGKEELRFPRGQGV | 0.1 | 0.2 |
| HGKEELRFPRGQGVP | 0.1 | 0.2 |
| GKEELRFPRGQGVPI | 0.1 | 0.3 |
| KEELRFPRGQGVPIN | 0.1 | 0.3 |
| EELRFPRGQGVPINT | 0.1 | 0.3 |
| ELRFPRGQGVPINTN | 0.1 | 0.2 |
| LRFPRGQGVPINTNS | 0.1 | 0.2 |
| RFPRGQGVPINTNSG | 0.1 | 0.2 |
| FPRGQGVPINTNSGP | 0.1 | 0.2 |
| PRGQGVPINTNSGPD | 0.1 | 0.2 |
| RGQGVPINTNSGPDD | 0.1 | 0.2 |
| GQGVPINTNSGPDDQ | 0.1 | 0.2 |
| QGVPINTNSGPDDQI | 0.1 | 0.1 |
| GVPINTNSGPDDQIG | 0.1 | 0.2 |
| VPINTNSGPDDQIGY | 0.1 | 0.2 |
| PINTNSGPDDQIGYY | 0.1 | 0.2 |
| INTNSGPDDQIGYYR | 0.1 | 0.2 |
| NTNSGPDDQIGYYRR | 0.1 | 0.3 |
| TNSGPDDQIGYYRRA | 0.1 | 0.2 |
| NSGPDDQIGYYRRAT | 0.1 | 0.2 |
| SGPDDQIGYYRRATR | 0.1 | 0.3 |
| GPDDQIGYYRRATRR | 0.1 | 0.3 |
| PDDQIGYYRRATRRV | 0.1 | 0.3 |
| DDQIGYYRRATRRVR | 0.1 | 0.3 |
| DQIGYYRRATRRVRG | 0.1 | 0.3 |
| QIGYYRRATRRVRGG | 0.1 | 0.2 |
| IGYYRRATRRVRGGD | 0.1 | 0.2 |
| GYYRRATRRVRGGDG | 0.1 | 0.2 |
| YYRRATRRVRGGDGK | 0.1 | 0.2 |
| YRRATRRVRGGDGKM | 0.1 | 0.2 |
| RRATRRVRGGDGKMK | 0.1 | 0.2 |
| RATRRVRGGDGKMKE | 0.1 | 0.2 |
| ATRRVRGGDGKMKEL | 0.1 | 0.2 |
| TRRVRGGDGKMKELS | 0.1 | 0.2 |
| RRVRGGDGKMKELSP | 0.1 | 0.2 |
| RVRGGDGKMKELSPR | 0.1 | 0.2 |
| VRGGDGKMKELSPRW | 0.1 | 0.2 |
| RGGDGKMKELSPRWY | 0.1 | 0.2 |
| GGDGKMKELSPRWYF | 0.1 | 0.2 |
| GDGKMKELSPRWYFY | 0.1 | 0.2 |
| DGKMKELSPRWYFYY | 0.1 | 0.2 |
| GKMKELSPRWYFYYL | 0.1 | 0.3 |
| KMKELSPRWYFYYLG | 0.1 | 0.2 |
| MKELSPRWYFYYLGT | 0.1 | 0.2 |
| KELSPRWYFYYLGTG | 0.1 | 0.3 |
| ELSPRWYFYYLGTGP | 0.1 | 0.2 |
| LSPRWYFYYLGTGPE | 0.1 | 0.2 |
| SPRWYFYYLGTGPEA | 0.1 | 0.2 |
| PRWYFYYLGTGPEAS | 0.1 | 0.2 |
| RWYFYYLGTGPEASL | 0.1 | 0.2 |
| WYFYYLGTGPEASLP | 0.1 | 0.2 |
| YFYYLGTGPEASLPY | 0.1 | 0.2 |
| FYYLGTGPEASLPYG | 0.1 | 0.2 |
| YYLGTGPEASLPYGA | 0.1 | 0.2 |
| YLGTGPEASLPYGAN | 0.1 | 0.2 |
| LGTGPEASLPYGANK | 0.1 | 0.2 |
| GTGPEASLPYGANKE | 0.1 | 0.2 |
| TGPEASLPYGANKEG | 0.1 | 0.2 |
| GPEASLPYGANKEGI | 0.1 | 0.2 |
| PEASLPYGANKEGIV | 0.1 | 0.2 |
| EASLPYGANKEGIVW | 0.1 | 0.2 |
| ASLPYGANKEGIVWV | 0.1 | 0.3 |
| SLPYGANKEGIVWVA | 0.1 | 0.2 |
| LPYGANKEGIVWVAT | 0.1 | 0.2 |
| PYGANKEGIVWVATE | 0.1 | 0.2 |
| YGANKEGIVWVATEG | 0.1 | 0.2 |
| GANKEGIVWVATEGA | 0.1 | 0.2 |
| ANKEGIVWVATEGAL | 0.1 | 0.2 |
| NKEGIVWVATEGALN | 0.1 | 0.2 |
| KEGIVWVATEGALNT | 0.1 | 0.2 |
| EGIVWVATEGALNTP | 0.1 | 0.2 |
| GIVWVATEGALNTPK | 0.1 | 0.2 |
| IVWVATEGALNTPKD | 0.1 | 0.2 |
| VWVATEGALNTPKDH | 0.1 | 0.3 |
| WVATEGALNTPKDHI | 0.1 | 0.2 |
| VATEGALNTPKDHIG | 0.2 | 0.2 |
| ATEGALNTPKDHIGT | 0.1 | 0.2 |
| TEGALNTPKDHIGTR | 0.2 | 0.3 |
| EGALNTPKDHIGTRN | 0.1 | 0.3 |
| GALNTPKDHIGTRNP | 0.1 | 0.2 |
| ALNTPKDHIGTRNPN | 0.1 | 0.2 |
| LNTPKDHIGTRNPNN | 0.1 | 0.2 |
| NTPKDHIGTRNPNNN | 0.1 | 0.2 |
| TPKDHIGTRNPNNNA | 0.1 | 0.2 |
| PKDHIGTRNPNNNAA | 0.1 | 0.2 |
| KDHIGTRNPNNNAAT | 0.1 | 0.2 |
| DHIGTRNPNNNAATV | 0.1 | 0.3 |
| HIGTRNPNNNAATVL | 0.1 | 0.3 |
| IGTRNPNNNAATVLQ | 0.1 | 0.3 |
| GTRNPNNNAATVLQL | 0.1 | 0.3 |
| TRNPNNNAATVLQLP | 0.1 | 0.2 |
| RNPNNNAATVLQLPQ | 0.1 | 0.2 |
| NPNNNAATVLQLPQG | 0.1 | 0.3 |
| PNNNAATVLQLPQGT | 0.1 | 0.3 |
| NNNAATVLQLPQGTT | 0.1 | 0.3 |
| NNAATVLQLPQGTTL | 0.1 | 0.3 |
| NAATVLQLPQGTTLP | 0.1 | 0.2 |
| AATVLQLPQGTTLPK | 0.1 | 0.2 |
| ATVLQLPQGTTLPKG | 0.1 | 0.2 |
| TVLQLPQGTTLPKGF | 0.1 | 0.3 |
| VLQLPQGTTLPKGFY | 0.1 | 0.3 |
| LQLPQGTTLPKGFYA | 0.1 | 0.2 |
| QLPQGTTLPKGFYAE | 0.1 | 0.2 |
| LPQGTTLPKGFYAEG | 0.1 | 0.3 |
| PQGTTLPKGFYAEGS | 0.1 | 0.2 |
| QGTTLPKGFYAEGSR | 0.1 | 0.2 |
| GTTLPKGFYAEGSRG | 0.1 | 0.2 |
| TTLPKGFYAEGSRGG | 0.1 | 0.2 |
| TLPKGFYAEGSRGGS | 0.1 | 0.2 |
| LPKGFYAEGSRGGSQ | 0.1 | 0.2 |
| PKGFYAEGSRGGSQA | 0.1 | 0.2 |
| KGFYAEGSRGGSQAS | 0.1 | 0.2 |
| GFYAEGSRGGSQASS | 0.1 | 0.2 |
| FYAEGSRGGSQASSR | 0.1 | 0.1 |
| YAEGSRGGSQASSRS | 0.1 | 0.2 |
| AEGSRGGSQASSRSS | 0.1 | 0.2 |
| EGSRGGSQASSRSSS | 0.1 | 0.2 |
| GSRGGSQASSRSSSR | 0.1 | 0.2 |
| SRGGSQASSRSSSRS | 0.1 | 0.2 |
| RGGSQASSRSSSRSR | 0.1 | 0.1 |
| GGSQASSRSSSRSRG | 0.1 | 0.2 |
| GSQASSRSSSRSRGN | 0.1 | 0.2 |
| SQASSRSSSRSRGNS | 0.1 | 0.2 |
| QASSRSSSRSRGNSR | 0.1 | 0.2 |
| ASSRSSSRSRGNSRN | 0.1 | 0.2 |
| SSRSSSRSRGNSRNS | 0.1 | 0.2 |
| SRSSSRSRGNSRNST | 0.1 | 0.2 |
| RSSSRSRGNSRNSTP | 0.1 | 0.2 |
| SSSRSRGNSRNSTPG | 0.1 | 0.2 |
| SSRSRGNSRNSTPGS | 0.1 | 0.2 |
| SRSRGNSRNSTPGSS | 0.1 | 0.2 |
| RSRGNSRNSTPGSSR | 0.1 | 0.2 |
| SRGNSRNSTPGSSRG | 0.1 | 0.2 |
| RGNSRNSTPGSSRGN | 0.1 | 0.2 |
| GNSRNSTPGSSRGNS | 0.1 | 0.2 |
| NSRNSTPGSSRGNSP | 0.1 | 0.2 |
| SRNSTPGSSRGNSPA | 0.1 | 0.2 |
| RNSTPGSSRGNSPAR | 0.1 | 0.2 |
| NSTPGSSRGNSPARM | 0.2 | 0.3 |
| STPGSSRGNSPARMA | 0.1 | 0.2 |
| TPGSSRGNSPARMAS | 0.1 | 0.3 |
| PGSSRGNSPARMASG | 0.1 | 0.3 |
| GSSRGNSPARMASGG | 0.1 | 0.2 |
| SSRGNSPARMASGGG | 0.1 | 0.2 |
| SRGNSPARMASGGGE | 0.1 | 0.2 |
| RGNSPARMASGGGET | 0.1 | 0.2 |
| GNSPARMASGGGETA | 0.2 | 0.2 |
| NSPARMASGGGETAL | 0.1 | 0.2 |
| SPARMASGGGETALA | 0.1 | 0.1 |
| PARMASGGGETALAL | 0.1 | 0.3 |
| ARMASGGGETALALL | 0.1 | 0.3 |
| RMASGGGETALALLL | 0.1 | 0.3 |
| MASGGGETALALLLL | 0.1 | 0.3 |
| ASGGGETALALLLLD | 0.1 | 0.2 |
| SGGGETALALLLLDR | 0.1 | 0.2 |
| GGGETALALLLLDRL | 0.1 | 0.2 |
| GGETALALLLLDRLN | 0.1 | 0.2 |
| GETALALLLLDRLNQ | 0.1 | 0.3 |
| ETALALLLLDRLNQL | 0.1 | 0.3 |
| TALALLLLDRLNQLE | 0.1 | 0.2 |
| ALALLLLDRLNQLES | 0.1 | 0.3 |
| LALLLLDRLNQLESK | 0.1 | 0.2 |
| ALLLLDRLNQLESKV | 0.1 | 0.3 |
| LLLLDRLNQLESKVS | 0.2 | 0.2 |
| LLLDRLNQLESKVSG | 0.1 | 0.2 |
| LLDRLNQLESKVSGK | 0.1 | 0.2 |
| LDRLNQLESKVSGKG | 0.1 | 0.2 |
| DRLNQLESKVSGKGQ | 0.1 | 0.3 |
| RLNQLESKVSGKGQQ | 0.1 | 0.2 |
| LNQLESKVSGKGQQQ | 0.1 | 0.3 |
| NQLESKVSGKGQQQQ | 0.1 | 0.3 |
| QLESKVSGKGQQQQG | 0.1 | 0.3 |
| LESKVSGKGQQQQGQ | 0.1 | 0.3 |
| ESKVSGKGQQQQGQT | 0.1 | 0.2 |
| SKVSGKGQQQQGQTV | 0.1 | 0.2 |
| KVSGKGQQQQGQTVT | 0.1 | 0.2 |
| VSGKGQQQQGQTVTK | 0.1 | 0.3 |
| SGKGQQQQGQTVTKK | 0.1 | 0.2 |
| GKGQQQQGQTVTKKS | 0.1 | 0.2 |
| KGQQQQGQTVTKKSA | 0.1 | 0.2 |
| GQQQQGQTVTKKSAA | 0.1 | 0.2 |
| QQQQGQTVTKKSAAE | 0.1 | 0.2 |
| QQQGQTVTKKSAAEA | 0.1 | 0.2 |
| QQGQTVTKKSAAEAS | 0.1 | 0.2 |
| QGQTVTKKSAAEASK | 0.1 | 0.2 |
| GQTVTKKSAAEASKK | 0.1 | 0.2 |
| QTVTKKSAAEASKKP | 0.1 | 0.2 |
| TVTKKSAAEASKKPR | 0.1 | 0.2 |
| VTKKSAAEASKKPRQ | 0.1 | 0.2 |
| TKKSAAEASKKPRQK | 0.1 | 0.2 |
| KKSAAEASKKPRQKR | 0.1 | 0.2 |
| KSAAEASKKPRQKRT | 0.1 | 0.1 |
| SAAEASKKPRQKRTA | 0.1 | 0.2 |
| AAEASKKPRQKRTAT | 0.1 | 0.2 |
| AEASKKPRQKRTATK | 0.1 | 0.2 |
| EASKKPRQKRTATKQ | 0.1 | 0.3 |
| ASKKPRQKRTATKQY | 0.1 | 0.2 |
| SKKPRQKRTATKQYN | 0.1 | 0.2 |
| KKPRQKRTATKQYNV | 0.1 | 0.2 |
| KPRQKRTATKQYNVT | 0.1 | 0.2 |
| PRQKRTATKQYNVTQ | 0.1 | 0.2 |
| RQKRTATKQYNVTQA | 0.1 | 0.2 |
| QKRTATKQYNVTQAF | 0.1 | 0.2 |
| KRTATKQYNVTQAFG | 0.1 | 0.2 |
| RTATKQYNVTQAFGR | 0.1 | 0.2 |
| TATKQYNVTQAFGRR | 0.1 | 0.3 |
| ATKQYNVTQAFGRRG | 0.1 | 0.3 |
| TKQYNVTQAFGRRGP | 0.1 | 0.3 |
| KQYNVTQAFGRRGPE | 0.1 | 0.1 |
| QYNVTQAFGRRGPEQ | 0.1 | 0.3 |
| YNVTQAFGRRGPEQT | 0.1 | 0.2 |
| NVTQAFGRRGPEQTQ | 0.1 | 0.2 |
| VTQAFGRRGPEQTQG | 0.1 | 0.2 |
| TQAFGRRGPEQTQGN | 0.1 | 0.2 |
| QAFGRRGPEQTQGNF | 0.1 | 0.2 |
| AFGRRGPEQTQGNFG | 0.1 | 0.2 |
| FGRRGPEQTQGNFGD | 0.1 | 0.1 |
| GRRGPEQTQGNFGDQ | 0.1 | 0.2 |
| RRGPEQTQGNFGDQD | 0.1 | 0.2 |
| RGPEQTQGNFGDQDL | 0.1 | 0.2 |
| GPEQTQGNFGDQDLI | 0.1 | 0.2 |
| PEQTQGNFGDQDLIR | 0.1 | 0.2 |
| EQTQGNFGDQDLIRQ | 0.1 | 0.0 |
| QTQGNFGDQDLIRQG | 0.1 | 0.2 |
| TQGNFGDQDLIRQGT | 0.1 | 0.2 |
| QGNFGDQDLIRQGTD | 0.1 | 0.2 |
| GNFGDQDLIRQGTDY | 0.1 | 0.2 |
| NFGDQDLIRQGTDYK | 0.1 | 0.2 |
| FGDQDLIRQGTDYKH | 0.1 | 0.2 |
| GDQDLIRQGTDYKHW | 0.1 | 0.2 |
| DQDLIRQGTDYKHWP | 0.1 | 0.2 |
| QDLIRQGTDYKHWPQ | 0.1 | 0.2 |
| DLIRQGTDYKHWPQI | 0.1 | 0.2 |
| LIRQGTDYKHWPQIA | 0.1 | 0.1 |
| IRQGTDYKHWPQIAQ | 0.1 | 0.2 |
| RQGTDYKHWPQIAQF | 0.1 | 0.2 |
| QGTDYKHWPQIAQFA | 0.1 | 0.2 |
| GTDYKHWPQIAQFAP | 0.1 | 0.2 |
| TDYKHWPQIAQFAPS | 0.1 | 0.2 |
| DYKHWPQIAQFAPSA | 0.1 | 0.2 |
| YKHWPQIAQFAPSAS | 0.1 | 0.2 |
| KHWPQIAQFAPSASA | 0.1 | 0.2 |
| HWPQIAQFAPSASAF | 0.1 | 0.2 |
| WPQIAQFAPSASAFF | 0.1 | 0.3 |
| PQIAQFAPSASAFFG | 0.1 | 0.2 |
| QIAQFAPSASAFFGM | 0.1 | 0.3 |
| IAQFAPSASAFFGMS | 0.1 | 0.3 |
| AQFAPSASAFFGMSR | 0.1 | 0.3 |
| QFAPSASAFFGMSRI | 0.1 | 0.3 |
| FAPSASAFFGMSRIG | 0.1 | 0.2 |
| APSASAFFGMSRIGM | 0.1 | 0.2 |
| PSASAFFGMSRIGME | 0.1 | 0.2 |
| SASAFFGMSRIGMEV | 0.1 | 0.2 |
| ASAFFGMSRIGMEVT | 0.1 | 0.2 |
| SAFFGMSRIGMEVTP | 0.1 | 0.2 |
| AFFGMSRIGMEVTPS | 0.1 | 0.2 |
| FFGMSRIGMEVTPSG | 0.1 | 0.2 |
| FGMSRIGMEVTPSGT | 0.1 | 0.2 |
| GMSRIGMEVTPSGTW | 0.1 | 0.2 |
| MSRIGMEVTPSGTWL | 0.1 | 0.2 |
| SRIGMEVTPSGTWLT | 0.1 | 0.2 |
| RIGMEVTPSGTWLTY | 0.1 | 0.2 |
| IGMEVTPSGTWLTYH | 0.1 | 0.2 |
| GMEVTPSGTWLTYHG | 0.1 | 0.2 |
| MEVTPSGTWLTYHGA | 0.1 | 0.2 |
| EVTPSGTWLTYHGAI | 0.1 | 0.2 |
| VTPSGTWLTYHGAIK | 0.1 | 0.2 |
| TPSGTWLTYHGAIKL | 0.1 | 0.2 |
| PSGTWLTYHGAIKLD | 0.1 | 0.2 |
| SGTWLTYHGAIKLDD | 0.1 | 0.2 |
| GTWLTYHGAIKLDDK | 0.1 | 0.2 |
| TWLTYHGAIKLDDKD | 0.1 | 0.2 |
| WLTYHGAIKLDDKDP | 0.1 | 0.2 |
| LTYHGAIKLDDKDPQ | 0.1 | 0.2 |
| TYHGAIKLDDKDPQF | 0.1 | 0.1 |
| YHGAIKLDDKDPQFK | 0.1 | 0.2 |
| HGAIKLDDKDPQFKD | 0.1 | 0.2 |
| GAIKLDDKDPQFKDN | 0.1 | 0.2 |
| AIKLDDKDPQFKDNV | 0.1 | 0.2 |
| IKLDDKDPQFKDNVI | 0.1 | 0.2 |
| KLDDKDPQFKDNVIL | 0.1 | 0.2 |
| LDDKDPQFKDNVILL | 0.1 | 0.3 |
| DDKDPQFKDNVILLN | 0.1 | 0.3 |
| DKDPQFKDNVILLNK | 0.1 | 0.4 |
| KDPQFKDNVILLNKH | 0.1 | 0.2 |
| DPQFKDNVILLNKHI | 0.1 | 0.3 |
| PQFKDNVILLNKHID | 0.1 | 0.2 |
| QFKDNVILLNKHIDA | 0.1 | 0.3 |
| FKDNVILLNKHIDAY | 0.1 | 0.2 |
| KDNVILLNKHIDAYK | 0.1 | 0.2 |
| DNVILLNKHIDAYKT | 0.1 | 0.2 |
| NVILLNKHIDAYKTF | 0.1 | 0.2 |
| VILLNKHIDAYKTFP | 0.1 | 0.2 |
| ILLNKHIDAYKTFPP | 0.1 | 0.2 |
| LLNKHIDAYKTFPPT | 0.1 | 0.2 |
| LNKHIDAYKTFPPTE | 0.1 | 0.2 |
| NKHIDAYKTFPPTEP | 0.1 | 0.2 |
| KHIDAYKTFPPTEPK | 0.1 | 0.2 |
| HIDAYKTFPPTEPKK | 0.1 | 0.2 |
| IDAYKTFPPTEPKKD | 0.1 | 0.2 |
| DAYKTFPPTEPKKDK | 0.1 | 0.2 |
| AYKTFPPTEPKKDKK | 0.1 | 0.1 |
| YKTFPPTEPKKDKKK | 0.1 | 0.2 |
| KTFPPTEPKKDKKKK | 0.1 | 0.2 |
| TFPPTEPKKDKKKKT | 0.1 | 0.2 |
| FPPTEPKKDKKKKTD | 0.1 | 0.2 |
| PPTEPKKDKKKKTDE | 0.1 | 0.2 |
| PTEPKKDKKKKTDEA | 0.1 | 0.2 |
| TEPKKDKKKKTDEAQ | 0.1 | 0.2 |
| EPKKDKKKKTDEAQP | 0.1 | 0.2 |
| PKKDKKKKTDEAQPL | 0.1 | 0.2 |
| KKDKKKKTDEAQPLP | 0.1 | 0.2 |
| KDKKKKTDEAQPLPQ | 0.1 | 0.2 |
| DKKKKTDEAQPLPQR | 0.1 | 0.2 |
| KKKKTDEAQPLPQRQ | 0.1 | 0.2 |
| KKKTDEAQPLPQRQK | 0.1 | 0.2 |
| KKTDEAQPLPQRQKK | 0.1 | 0.2 |
| KTDEAQPLPQRQKKQ | 0.1 | 0.2 |
| TDEAQPLPQRQKKQP | 0.1 | 0.1 |
| DEAQPLPQRQKKQPT | 0.1 | 0.2 |
| EAQPLPQRQKKQPTV | 0.1 | 0.2 |
| AQPLPQRQKKQPTVT | 0.1 | 0.1 |
| QPLPQRQKKQPTVTL | 0.1 | 0.3 |
| PLPQRQKKQPTVTLL | 0.1 | 0.3 |
| LPQRQKKQPTVTLLP | 0.1 | 0.3 |
| PQRQKKQPTVTLLPA | 0.1 | 0.3 |
| QRQKKQPTVTLLPAA | 0.1 | 0.3 |
| RQKKQPTVTLLPAAD | 0.1 | 0.2 |
| QKKQPTVTLLPAADM | 0.1 | 0.3 |
| KKQPTVTLLPAADMD | 0.1 | 0.2 |
| KQPTVTLLPAADMDD | 0.1 | 0.2 |
| QPTVTLLPAADMDDF | 0.1 | 0.2 |
| PTVTLLPAADMDDFS | 0.1 | 0.2 |
| TVTLLPAADMDDFSR | 0.1 | 0.2 |
| VTLLPAADMDDFSRQ | 0.1 | 0.2 |
| TLLPAADMDDFSRQL | 0.1 | 0.1 |
| LLPAADMDDFSRQLQ | 0.1 | 0.2 |
| LPAADMDDFSRQLQN | 0.1 | 0.2 |
| PAADMDDFSRQLQNS | 0.1 | 0.2 |
| AADMDDFSRQLQNSM | 0.2 | 0.2 |
| ADMDDFSRQLQNSMS | 0.1 | 0.1 |
| DMDDFSRQLQNSMSG | 0.1 | 0.2 |
| MDDFSRQLQNSMSGA | 0.2 | 0.2 |
| DDFSRQLQNSMSGAS | 0.2 | 0.2 |
| DFSRQLQNSMSGASA | 0.1 | 0.2 |
| FSRQLQNSMSGASAD | 0.1 | 0.2 |
| SRQLQNSMSGASADS | 0.1 | 0.2 |
| RQLQNSMSGASADST | 0.1 | 0.2 |
| QLQNSMSGASADSTQ | 0.1 | 0.2 |
| LQNSMSGASADSTQA | 0.2 | 0.2 |

[0223] TABLE 7
Data of assay for SARS-CoV (Hong Kong strain obtained from patient 5688) neutralizing
activity of human monoclonal anti-SARS-CoV antibodies.

| TCID₅₀/ | Conc. (μg/ml) | | | | | | | | | | | |
|---|---|---|---|---|---|---|---|---|---|---|---|---|
| Antibody | 50.00 | 25.00 | 12.50 | 6.25 | 3.12 | 1.56 | 0.78 | 0.39 | 0.20 | 0.10 | 0.05 | 0.02 |
| 10/02-027 | 3+ | 3+ | 3+ | 3+ | 3+ | 3+ | 3+ | 3+ | 3+ | 3+ | 3+ | 3+ |
| 10/02-027 | 3+ | 3+ | 3+ | 3+ | 3+ | 3+ | 3+ | 3+ | 3+ | 3+ | 3+ | 3+ |
| 10/02-027 | 3+ | 3+ | 3+ | 3+ | 3+ | 3+ | 3+ | 3+ | 3+ | 3+ | 3+ | 3+ |
| 10/03-013 | − | − | + | − | + | + | + | 3+ | 3+ | 3+ | 3+ | 3+ |
| 10/03-013 | − | − | − | − | − | − | − | 2+ | 2+ | 3+ | 3+ | 3+ |
| 10/03-013 | − | − | − | − | + | − | 2+ | 2+ | 3+ | 3+ | 3+ | 3+ |
| 10/03-014 | − | − | − | − | − | − | − | − | 2+ | 3+ | 3+ | 3+ |
| 10/03-014 | − | − | − | − | − | − | − | + | + | 2+ | 3+ | 3+ |
| 10/03-014 | − | − | − | − | − | − | − | + | 2+ | 3+ | 3+ | 3+ |
| 30/02-027 | 3+ | 3+ | 3+ | 3+ | 3+ | 3+ | 3+ | 3+ | 3+ | 3+ | 3+ | 3+ |
| 30/02-027 | 3+ | 3+ | 3+ | 3+ | 3+ | 3+ | 3+ | 3+ | 3+ | 3+ | 3+ | 3+ |
| 30/02-027 | 3+ | 3+ | 3+ | 3+ | 3+ | 3+ | 3+ | 3+ | 3+ | 3+ | 3+ | 3+ |
| 30/03-013 | − | − | − | − | − | − | 2+ | 2+ | 3+ | 3+ | 3+ | 3+ |
| 30/03-013 | − | − | − | − | + | + | 2+ | 3+ | 3+ | 3+ | 3+ | 3+ |
| 30/03-013 | − | − | − | + | + | 2+ | 2+ | 3+ | 3+ | 3+ | 3+ | 3+ |
| 30/03-014 | − | − | − | − | − | + | + | 3+ | 3+ | 3+ | 3+ | 3+ |
| 30/03-014 | − | − | + | − | − | − | − | + | 2+ | 3+ | 3+ | 3+ |
| 30/03-014 | − | − | − | − | − | − | + | + | 2+ | 3+ | 3+ | 3+ |
| 100/ | 3+ | 3+ | 3+ | 3+ | 3+ | 3+ | 3+ | 3+ | 3+ | 3+ | 3+ | 3+ |
| 02-027 | | | | | | | | | | | | |
| 100/ | 3+ | 3+ | 3+ | 3+ | 3+ | 3+ | 3+ | 3+ | 3+ | 3+ | 3+ | 3+ |
| 02-027 | | | | | | | | | | | | |
| 100/ | 3+ | 3+ | 3+ | 3+ | 3+ | 3+ | 3+ | 3+ | 3+ | 3+ | 3+ | 3+ |
| 02-027 | | | | | | | | | | | | |
| 100/ | − | − | − | + | + | + | 2+ | 3+ | 3+ | 3+ | 3+ | 3+ |
| 03-013 | | | | | | | | | | | | |
| 100/ | − | − | + | + | + | 2+ | 3+ | 3+ | 3+ | 3+ | 3+ | 3+ |
| 03-013 | | | | | | | | | | | | |
| 100/ | − | − | + | + | + | 2+ | 3+ | 3+ | 3+ | 3+ | 3+ | 3+ |
| 03-013 | | | | | | | | | | | | |
| 100/ | − | − | − | − | − | + | 2+ | 2+ | 3+ | 3+ | 3+ | 3+ |
| 03-014 | | | | | | | | | | | | |
| 100/ | − | − | − | − | + | + | 2+ | 2+ | 3+ | 3+ | 3+ | 3+ |
| 03-014 | | | | | | | | | | | | |
| 100/ | − | − | − | − | + | + | 2+ | 2+ | 3+ | 3+ | 3+ | 3+ |
| 03-014 | | | | | | | | | | | | |

−: No CPE
+: CPE ≦ 50%
2+: CPE 50-90%
3+: CPE 100%

[0224] TABLE 8

Human IgG heavy chain
variable region primers (sense).

| | | |
|---|---|---|
| Primer name | Primer nucleotide sequence | SEQ ID NO |

| | | |
|---|---|---|
| HuVH1B/7A | 5′-CAGRTGCAGCTGGTG CARTCTGG-3′ | SEQ ID NO:132 |
| HuVH1C | 5′-SAGGTCCAGCTGGTR CAGTCTGG-3′ | SEQ ID NO:133 |
| HuVH2B | 5′-SAGGTGCAGCTGGTG GAGTCTGG-3′ | SEQ ID NO:134 |
| HuVH3B | 5′-SAGGTGCAGCTGGTG GAGTCTGG-3′ | SEQ ID NO:135 |
| HuVH3C | 5′-GAGGTGCAGCTGGTG GAGWCYGG-3′ | SEQ ID NO:136 |
| HuVH4B | 5′-CAGGTGCAGCTACAG CAGTGGGG-3′ | SEQ ID NO:137 |
| HuVH4C | 5′-CAGSTGCAGCTGCAG GAGTCSGG-3′ | SEQ ID NO:138 |
| HuVH5B | 5′-GARGTGCAGCTGGTG CAGTCTGG-3′ | SEQ ID NO:139 |
| HuVH6A | 5′-CAGGTACAGCTGCAG CAGTCAGG-3′ | SEQ ID NO:140 |

[0225] TABLE 9

Human IgG heavy chain
J-region primers (anti-sense).

| | | |
|---|---|---|
| Primer name | Primer nucleotide sequence | SEQ ID NO |

| | | |
|---|---|---|
| HuJH1/2 | 5′-TGAGGAGACGGTGAC CAGGGTGCC-3′ | SEQ ID NO:141 |
| HuJH3 | 5′-TGAAGAGACGGTGAC CATTGTCCC-3′ | SEQ ID NO:142 |
| HuJH4/5 | 5′-TGAGGAGACGGTGAC CAGGGTTCC-3′ | SEQ ID NO:143 |
| HuJH6 | 5′-TGAGGAGACGGTGAC CGTGGTCCC-3′ | SEQ ID NO:144 |

[0226] TABLE 10

Human IgG heavy chain variable region primers extended
with SfiI/NcoI restriction sites (sense) and human IgG
heavy chain J-region primers extended with
XhoI/BstEII restriction sites (anti-sense).

| | | |
|---|---|---|
| Primer name | Primer nucleotide sequence | SEQ ID NO |

| | | |
|---|---|---|
| HuVH1B/7A-NcoI | 5′-GTCCTCGCAACTGCGGCCCAGCCGGCCATG | SEQ ID NO:145 |
| | GCCCAGRTGCAGCTGGTGCARTCTGG-3′ | |
| HuVH1C-NcoI | 5′-GTCCTCGCAACTGCGGCCCAGCCGGCCATG | SEQ ID NO:146 |
| | GCCSAGGTCCAGCTGGTRCAG TCTGG-3′ | |
| HuVH2B-NcoI | 5′-GTCCTCGCAACTGCGGCCCAGCCGGCCATG | SEQ ID NO: 147 |
| | GCC CAGRTCACCTTGAAGGAG TCTGG-3′ | |
| HuVH3B-NcoI | 5′-GTCCTCGCAACTGCGGCCCAGCCGGCCATG | SEQ ID NO:148 |
| | GCCSAGGTGCAGCTGGTGGAGTCTGG-3′ | |
| HuVH3C-NcoI | 5′-GTCCTCGCAACTGCGGCCCAGCCGGCCATG | SEQ ID NO:149 |
| | GCC GAGGTGCAGCTGGTGGAG WCYGG-3′ | |
| HuVH4B-NcoI | 5′-GTCCTCGCAACTGCGGCCCAGCCGGCCATG | SEQ ID NO:150 |
| | GCC CAGGTGCAGCTACAGCAG TGGGG-3′ | |
| HuVH4C-NcoI | 5′-GTCCTCGCAACTGCGGCCCAGCCGGCCATG | SEQ ID NO:151 |
| | GCCCAGSTGCAGCTGCAGGAGTCSGG-3′ | |
| HuVH5B-NcoI | 5′-GTCCTCGCAACTGCGGCCCAGCCGGCCATG | SEQ ID NO:152 |
| | GCC GARGTGCAGCTGGTGCAG TCTGG-3′ | |
| HuVH6A-NcoI | 5′-GTCCTCGCAACTGCGGCCCAGCCGGCCATG | SEQ ID NO:153 |
| | GCC CAGGTACAGCTGCAGCAG TCAGG-3′ | |
| HuJH1/2-XhoI | 5′-GAGTCATTCTCGACTCGAGACGGTGACCAG | SEQ ID NO:154 |
| | GGTGCC-3′ | |
| HuJH3-XhoI | 5′-GAGTCATTCTCGACTCGAGACGGTGACCAT | SEQ ID NO: 155 |
| | TGT CCC-3′ | |
| HuJH4/5-XhoI | 5′-GAGTCATTCTCGACTCGAGACGGTGACCAG | SEQ ID NO:156 |
| | GGT TCC-3′ | |
| HuJH6-XhoI | 5′-GAGTCATTCTCGACTCGA | SEQ ID NO:157 |
| | GACGGTGACCGTGGTCCC-3′ | |

[0227] TABLE 11

Human lambda chain
variable region primers (sense).

| | | |
|---|---|---|
| Primer name | Primer nucleotide sequence | SEQ ID NO |

| | | |
|---|---|---|
| HuVλ1A | 5′-CAGTCTGTGCTGACT CAGCCACC-3′ | SEQ ID NO:161 |
| HuVλ1B | 5′-CAGTCTGTGYTGACG CAGCCGCC-3′ | SEQ ID NO:162 |
| HuVλ1C | 5′-CAGTCTGTCGTGACG CAGCCGCC-3′ | SEQ ID NO:163 |
| HuVλ2 | 5′-CARTCTGCCCTGACT CAGCCT-3′ | SEQ ID NO:164 |
| HuVλ3A | 5′-TCCTATGWGCTGACT CAGCCACC-3′ | SEQ ID NO:165 |
| HuVλ3B | 5′-TCTTCTGAGCTGACT CAGGACCC-3′ | SEQ ID NO:166 |
| HuVλ4 | 5′-CACGTTATACTGACT CAACCGCC-3′ | SEQ ID NO:167 |
| HuVλ5 | 5′-CAGGCTGTGCTGACT CAGCCGTC-3′ | SEQ ID NO:168 |
| HuVλ6 | 5′-AATTTTATGCTGACT CAGCCCCA-3′ | SEQ ID NO:169 |
| HuVλ7/8 | 5′-CAGRCTGTGGTGACY CAGGAGCC-3′ | SEQ ID NO:170 |
| HuVλ9 | 5′-CWGCCTGTGCTGACT CAGCCMCC-3′ | SEQ ID NO:171 |

[0228] TABLE 12

Human kappa chain
variable region primers (sense).

| | | |
|---|---|---|
| Primer name | Primer nucleotide sequence | SEQ ID NO |

| | | |
|---|---|---|
| HuVκ1B | 5′-GACATCCAGWTGACCCAGTCTCC-3′ | SEQ ID NO:172 |
| HuVκ2 | 5′-GATGTTGTGATGACT CAGTCTCC-3′ | SEQ ID NO:173 |
| HuVκ3 | 5′-GAAATTGTGWTGACR CAGTCTCC-3′ | SEQ ID NO:174 |
| HuVκ4 | 5′-GATATTGTGATGACC CACACTCC-3′ | SEQ ID NO:175 |
| HuVκ5 | 5′-GAAACGACACTCACG CAGTCTCC-3′ | SEQ ID NO:176 |
| HuVκ6 | 5′-GAAATTGTGCTGACTCAGTCTCC-3′ | SEQ ID NO:177 |

[0229] TABLE 13

Human lambda chain
J-region primers (anti-sense).

| | | |
|---|---|---|
| Primer name | Primer nucleotide sequence | SEQ ID NO |

| | | |
|---|---|---|
| HuJλ1 | 5′-ACCTAGGACGGTGACCTTGGTCCC-3′ | SEQ ID NO:178 |
| HuJλ2/3 | 5′-ACCTAGGACGGTCAG CTTGGTCCC-3′ | SEQ ID NO:179 |
| HuJλ4/5 | 5′-ACYTAAAACGGTGAG CTGGGTCCC-3′ | SEQ ID NO:180 |

[0230] TABLE 14

Human lambda chain
J-region primers (anti-sense).

| | | |
|---|---|---|
| Primer name | Primer nucleotide sequence | SEQ ID NO |
| HuJκ1 | 5′-ACGTTTGATTTCCAC CTTGGTCCC-3′ | SEQ ID NO:181 |
| HuJκ2 | 5′-ACGTTTGATCTCCAG CTTGGTCCC-3′ | SEQ ID NO:182 |
| HuJκ3 | 5′-ACGTTTGATATCCAC TTTGGTCCC-3′ | SEQ ID NO:183 |
| HuJκ4 | 5′-ACGTTTGATCTCCAC CTTGGTCCC-3′ | SEQ ID NO:184 |
| HuJκ5 | 5′-ACGTTTAATCTCCAG TCGTGTCCC-3′ | SEQ ID NO:185 |

[0231] TABLE 15

Human kappa chain variable region primers extended
with SalI restriction sites (sense), human kappa
chain J-region primers extended with NotI
restriction sites (anti-sense), human lambda
chain variable region primers extended with SalI
restriction sites (sense) and human lambda chain
J-region primers extended with NotI
restriction sites (anti-sense).

| | | |
|---|---|---|
| Primer name | Primer nucleotide sequence | SEQ ID NO |

| | | |
|---|---|---|
| HuVκ1B-SalI | 5′-TGAGCACACAGGTCGACGGACATCCAGWTG | SEQ ID NO:186 |
| | ACCCAGTCTCC-3′ | |
| HuVκ2-SalI | 5′-TGAGCACACAGGTCGACGGATGTTGTGATG | SEQ ID NO:187 |
| | ACTCAGTCTCC-3′ | |
| HuVκ3B-SalI | 5′-TGAGCACACAGGTCGACGGAAATTGTGWTG | SEQ ID NO:188 |
| | ACRCAGTCTCC-3′ | |
| HuVκ4B-SalI | 5′-TGAGCACACAGGTCGACGGATATTGTGATG | SEQ ID NO:189 |
| | ACCCACACTCC-3′ | |
| HuVκ5-SalI | 5′-TGAGCACACAGGTCGACGGAAACGACACTC | SEQ ID NO:190 |
| | ACGCAGTCTCC-3′ | |
| HuVκ6-SalI | 5′-TGAGCACACAGGTCGACGGAAATTGTGCTG | SEQ ID NO:191 |
| | ACTCAGTCTCC-3′ | |
| HuJκ1-NotI | 5′-GAGTCATTCTCGACTTGCGGCCGCACGTTTG | SEQ ID NO:192 |
| | ATTTCCACCTTGGTCCC-3′ | |
| HuJκ2-NotI | 5′-GAGTCATTCTCGACTTGCGGCCGCACGTTTG | SEQ ID NO:193 |
| | ATCTCCAGCTTGGTCCC-3′ | |
| HuJκ3-NotI | 5′-GAGTCATTCTCGACTTGCGGCCGCACGTTTG | SEQ ID NO:194 |
| | ATATCCACTTTGGTCCC-3′ | |
| HuJκ4-NotI | 5′-GAGTCATTCTCGACTTGCGGCCGCACGTTTG | SEQ ID NO:195 |
| | ATCTCCACCTTGGTCCC-3′ | |
| HuJκ5-NotI | 5′-GAGTCATTCTCGACTTGCGGCCGCACGTTTA | SEQ ID NO:196 |
| | ATCTCCAGTCGTGTCCC-3′ | |
| HuVλ1A-SalI | 5′-TGAGCACACAGGTCGACGCAGTCTGTGCTGA | SEQ ID NO:197 |
| | CTCAGCCACC-3′ | |
| HuVλ1B-SalI | 5′-TGAGCACACAGGTCGACGCAGTCTGTGYTG | SEQ ID NO:198 |
| | ACGCAGCCGCC-3′ | |
| HuVλ1C-SalI | 5′-TGAGCACACAGGTCGACGCAGTCTGTCGTGA | SEQ ID NO:199 |
| | CGCAGCCGCC-3′ | |
| HuVλ2-SalI | 5′-TGAGCACACAGGTCGACGCARTCTGCCCTGA | SEQ ID NO:200 |
| | CTCAGCCT-3′ | |
| HuVλ3A-SalI | 5′-TGAGCACACAGGTCGACGTCCTATGWGCTG | SEQ ID NO:201 |
| | ACTCAGCCACC-3′ | |
| HuVλ3B-SalI | 5′-TGAGCACACAGGTCGACGTCTTCTGAGCTGA | SEQ ID NO:202 |
| | CTCAGGACCC-3′ | |
| HuVλ4-SalI | 5′-TGAGCACACAGGTCGACGCACGTTATACTGA | SEQ ID NO:203 |
| | CTCAACCGCC-3′ | |
| HuVλ5-SalI | 5′-TGAGCACACAGGTCGACGCAGGCTGTGCTG | SEQ ID NO:204 |
| | ACTCAGCCGTC-3′ | |
| HuVλ6-SalI | 5′-TGAGCACACAGGTCGACGAATTTTATGCTGA | SEQ ID NO:205 |
| | CTCAGCCCCA-3′ | |
| HuVλ7/8-SalI | 5′-TGAGCACACAGGTCGACGCAGRCTGTGGTG | SEQ ID NO:206 |
| | ACYCAGGAGCC-3′ | |
| HuVλ9-SalI | 5′-TGAGCACACAGGTCGACGCWGCCTGTGCTG | SEQ ID NO:207 |
| ACTCAGCCMCC-3′ | | |
| HuJλ1-NotI | 5′-GAGTCATTCTCGACTTGCGGCCGCACCTAGG | SEQ ID NO:208 |
| | ACGGTGACCTTGGTCCC-3′ | |
| HuJλ2/3-NotI | 5′-GAGTCATTCTCGACTTGCGGCCGCACCTAGG | SEQ ID NO:209 |
| | ACGGTCAGCTTGGTCCC-3′ | |
| HuJλ4/5-NotI | 5′-GAGTCATTCTCGACTTGCGGCCGCACYTAAA | SEQ ID NO:210 |
| | ACGGTGAGCTGGGTCCC-3′ | |

[0232] TABLE 16
Distribution of the different light chain products
over the 10 fractions.

| | Number of | Fraction | |
|---|---|---|---|
| Light chain products | alleles | number | alleles/fraction |
| Vk1B/Jk1-5 | 19 | 1 and 2 | 9.5 |
| Vk2/Jk1-5 | 9 | 3 | 9 |
| Vk3B/Jk1-5 | 7 | 4 | 7 |
| Vk4B/Jk1-5 | 1 | 5 | 5 |
| Vk5/Jk1-5 | 1 | | |
| Vk6/Jk1-5 | 3 | | |
| Vλ1A/Jl1-3 | 5 | 6 | 5 |
| Vλ1B/Jl1-3 | | | |
| Vλ1C/Jl1-3 | | | |
| Vλ2/Jl1-3 | 5 | 7 | 5 |
| Vλ3A/Jl1-3 | 9 | 8 | 9 |
| Vλ3B/Jl1-3 | | | |
| Vλ4/Jl1-3 | 3 | 9 | 5 |
| Vλ5/Jl1-3 | 1 | | |
| Vλ6/Jl1-3 | 1 | | |
| Vλ7/8/Jl1-3 | 3 | 10 | 6 |
| Vλ9/Jl1-3 | 3 | | |

[0233] TABLE 17
Binding of single-chain (scFv) phage antibodies
selected from a naïve or an immune phage display
library to a SARS-CoV preparation (Frankfurt 1 strain).

| Name | SARS-CoV preparation | Number of |
|---|---|---|
| phage antibody | (OD492 nm) | ELISA plate |
| sc03-019 | 0.333 | 1 |
| sc03-020 | 0.671 | 2 |
| sc03-021 | 0.215 | 2 |
| sc03-022 | 1.18 | 2 |
| sc03-023 | 1.311 | 2 |
| sc03-024 | 0.235 | 2 |
| sc03-025 | 1.636 | 2 |
| sc03-026 | 1.071 | 2 |
| sc03-027 | 1.163 | 2 |
| sc03-029 | 0.629 | 4 |
| sc03-030 | 1.15 | 3 |
| sc03-031 | 0.635 | 4 |
| sc03-032 | 1.219 | 3 |
| sc03-033 | 0.288 | 4 |
| sc03-034 | 0.802 | 3 |
| sc03-035 | 0.596 | 3 |
| sc03-036 | 0.24 | 3 |
| sc03-037 | 0.287 | 4 |
| sc03-038 | 0.314 | 4 |
| sc03-039 | 0.851 | 3 |
| sc03-040 | 0.616 | 4 |
| sc03-041 | 0.861 | 4 |
| sc03-042 | 0.645 | 4 |
| sc03-043 | 1.271 | 3 |
| sc03-044 | 0.518 | 4 |
| sc03-045 | 0.577 | 4 |
| sc03-046 | 1.897 | 3 |
| sc03-047 | 0.866 | 4 |
| sc03-048 | 0.397 | 3 |
| sc03-049 | 1.006 | 3 |
| sc03-050 | 1.184 | 3 |
| sc03-051 | 0.602 | 3 |
| sc03-052 | 0.355 | 4 |
| sc03-053 | 0.218 | 3 |
| sc03-054 | 0.428 | 4 |
| sc03-055 | 0.608 | 3 |
| sc03-056 | 0.924 | 3 |
| sc03-057 | 1.19 | 3 |
| sc03-058 | 0.355 | 4 |
| sc03-059 | 0.293 | 1 |

plate 1: SARS-CoV preparation (OD492 nm) for no single chain phage antibody was 0.060.
plate 2: SARS-CoV preparation (OD492 nm) for no single chain phage antibody was 0.211.
plate 3: SARS-CoV preparation (OD492 nm) for no single chain phage antibody was 0.054.
plate 4: SARS-CoV preparation (OD492 nm) for no single chain phage antibody was 0.051.

[0234] TABLE 18

Data of the single-chain Fvs capable of binding
SARS-CoV and obtained from a naïve
and an immune phage display library.

| | SEQ ID NO | SEQ ID NO | | | |
|---|---|---|---|---|---|
| Name | of nucleotide | of amino acid | | | |
| scFv | sequence | sequence | HCDR3 | V_{H}-germline | V_{I}-germline |
| sc03-019 | 211 | 212 | FPGGTRSRGYMDV | V_{H}3-30.3 | V_{K}III (L6) |
| | | | (SEQ ID NO:291) | (DP-46) | |
| sc03-020 | 213 | 214 | GSGISTPMDV | V_{H}5-51 | V_{K}IV |
| | | | (SEQ ID NO:292) | (DP-73) | (B3-DPK24) |
| sc03-021 | 215 | 216 | GSGISTPMDV | V_{H}5-51 | V_{K}IV |
| | | | (SEQ ID NO:292) | (DP-73) | (B3-DPK24) |
| sc03-022 | 217 | 218 | GSGISTPMDV | V_{H}5-51 | V_{K}IV |
| | | | (SEQ ID NO:292) | (DP-73) | (B3-DPK24) |
| sc03-023 | 219 | 220 | RVEVVEYQLLRPR | V_{H}4-34 | V_{L}II |
| | | | YKSWFDP | (DP-63) | (2a2-V1-04) |
| | | | (SEQ ID NO:293) | | |
| sc03-024 | 221 | 222 | KSAGSNAFDI | V_{H}7-04.1 | V_{L}1 |
| | | | (SEQ ID NO:294) | (DP-21) | (1b-V1-19) |
| sc03-025 | 223 | 224 | TTNRAFDI | V_{H}3-64 | V_{K}IV |
| | | | (SEQ ID NO:295) | | (B3-DPK24) |
| sc03-026 | 225 | 226 | TTNRAFDI | V_{H}3-64 | V_{K}IV |
| | | | (SEQ ID NO:295) | | (B3-DPK24) |
| sc03-027 | 227 | 228 | TTNRAFDI | V_{H}3-64 | V_{K}IV |
| | | | (SEQ ID NO:295) | | (B3-DPK24) |
| sc03-029 | 229 | 230 | TTNRAFDI | V_{H}3-64 | V_{K}IV |
| | | | (SEQ ID NO:295) | | (B3-DPK24) |
| sc03-030 | 231 | 232 | TTNRAFDI | V_{H}3-64 | V_{K}IV |
| | | | (SEQ ID NO:295) | | (B3-DPK24) |
| sc03-031 | 233 | 234 | ESGGGYDNHFDY | V_{H}1-69 | V_{L}1 |
| | | | (SEQ ID NO:296) | (DP-10) | (1c-V1-16) |
| sc03-032 | 235 | 236 | DGWDLTGSFLGYG | V_{H}1-e | V_{L}1 |
| | | | MDV | (DP-88) | (1c-V1-16) |
| | | | (SEQ ID NO:297) | | |
| sc03-033 | 237 | 238 | GSGISTPMDV | V_{H}5-51 | V_{K}IV |
| | | | (SEQ ID NO:292) | (DP-73) | (B3-DPK24) |
| sc03-034 | 239 | 240 | GSGISTPMDV | V_{H}5-51 | V_{K}IV |
| | | | (SEQ ID NO:292) | (DP-73) | (B3-DPK24) |
| sc03-035 | 241 | 242 | GSGISTPMDV | V_{H}5-51 | V_{K}IV |
| | | | (SEQ ID NO:292) | (DP-73) | (B3-DPK24) |
| sc03-036 | 243 | 244 | GSGISTPMDV | V_{H}5-51 | V_{K}IV |
| | | | (SEQ ID NO:292) | (DP-73) | (B3-DPK24) |
| sc03-037 | 245 | 246 | DAHRGFGMDV | V_{H}3-53 | V_{L}3 |
| | | | (SEQ ID NO:298) | (DP-42) | (31-V2-13) |
| sc03-038 | 247 | 248 | DAHRGFGMDV | V_{H}3-53 | V_{L}3 |
| | | | (SEQ ID NO:298) | (DP-42) | (31-V2-13) |
| sc03-039 | 249 | 250 | GSKWNDVGGGDY | V_{H}3-23 | V_{L}6 |
| | | | (SEQ ID NO:299) | (DP-47) | (6A-V1-22) |
| sc03-040 | 251 | 252 | TTNRAFDI | V_{H}3-64 | V_{K}IV |
| | | | (SEQ ID NO:295) | | (B3-DPK24) |
| sc03-041 | 253 | 254 | TTNRAFDI | V_{H}3-64 | V_{K}IV |
| | | | (SEQ ID NO:295) | | (B3-DPK24) |
| sc03-042 | 255 | 256 | TTNRAFDI | V_{H}3-64 | V_{K}IV |
| | | | (SEQ ID NO:295) | | (B3-DPK24) |
| sc03-043 | 257 | 258 | TTNRAFDI | V_{H}3-64 | V_{K}IV |
| | | | (SEQ ID NO:295) | | (B3-DPK24) |
| sc03-044 | 259 | 260 | TTNRAFDI | V_{H}3-64 | V_{K}IV |
| | | | (SEQ ID NO:295) | | (B3-DPK24) |
| sc03-045 | 261 | 262 | TTNRAFDI | V_{H}3-64 | V_{K}IV |
| | | | (SEQ ID NO:295) | | (B3-DPK24) |
| sc03-046 | 263 | 264 | TTNRAFDI | V_{H}3-64 | V_{K}IV |
| | | | (SEQ ID NO:295) | | (B3-DPK24) |
| sc03-047 | 265 | 266 | TTNRAFDI | V_{H}3-64 | V_{K}IV |
| | | | (SEQ ID NO:295) | | (B3-DPK24) |
| sc03-048 | 267 | 268 | TTNRAFDI | V_{H}3-64 | V_{K}IV |
| | | | (SEQ ID NO:295) | (B3-DPK24) | |
| sc03-049 | 269 | 270 | TTNRAFDI | V_{H}3-64 | V_{K}IV |
| | | | (SEQ ID NO:295) | | (B3-DPK24) |
| sc03-050 | 271 | 272 | TTNRAFDI | V_{H}3-64 | V_{K}IV |
| | | | (SEQ ID NO:295) | | (B3-DPK24) |
| sc03-051 | 273 | 274 | GSGISTPMDV | V_{H}5-51 | V_{K}IV |
| | | | (SEQ ID NO:292) | (DP-73) | (B3-DPK24) |
| sc03-052 | 275 | 276 | GSGISTPMDV | V_{H}5-51 | V_{K}IV |
| | | | (SEQ ID NO:292) | (DP-73) | (B3-DPK24) |
| sc03-053 | 277 | 278 | GTGYLRSYHGMDV | V_{H}1-03 | V_{K}II |
| | | | (SEQ ID NO:300) | (DP-25) | (A19/A03-D |
| | | | | | PK15) |
| sc03-054 | 279 | 280 | TTNRAFDI | V_{H}3-64 | V_{K}IV |
| | | | (SEQ ID NO:295) | | (B3-DPK24) |
| sc03-055 | 281 | 282 | RVEVVEYQLLRPR | V_{H}4-34 | V_{L}1 |
| | | | YKSWFDP | (DP-63) | (1b-V1-19) |
| | | | (SEQ ID NO:293) | | |
| sc03-056 | 283 | 284 | GSGISTPMDV | V_{H}5-51 | V_{K}IV |
| | | | (SEQ ID NO:292) | (DP-73) | (B3-DPK24) |
| sc03-057 | 285 | 286 | PDIVVAGHSPPHYT | V_{H}1-69 | V_{K}I |
| | | | MDV | (DP-10) | L11-DPK3 |
| | | | (SEQ ID NO:301) | | |
| sc03-058 | 287 | 288 | TTNRAFDI | V_{H}3-64 | V_{K}VI |
| | | | (SEQ ID NO:295) | | A14-DPK25 |
| sc03-059 | 289 | 290 | FPGGTRSRGYMDV | V_{H}1-46 | V_{K}III (L6) |
| | | | (SEQ ID NO:291) | (DP-7) | |

[0235] TABLE 19
Scheme of the in vivo ferret experiment.
Sampling (days)^{c}

| | Animals/ | | | | | | | | | | | |
|---|---|---|---|---|---|---|---|---|---|---|---|---|
| Group | group | Challenge (intratracheal)^{a} | | Split^{b} | 0 | 1 | 2 | 3 | 4 | 5 | 6 | 7 |
| 1 | 4 | 1,000 | 03-014Ab | 2 | S | | S | | S + LT | | | |
| | | (TCID₅₀/ml) | | 2 | S | | S | | S | | | S + LT |
| 2 | 4 | 10,000 | | 2 | S | | S | | S + LT | | | |
| | | (TCID₅₀/ml) | | 2 | S | | S | | S | | | S + LT |
| 3 | 4 | 1,000 | Contr Ab | 2 | S | | S | | S + LT | | | |
| | | (TCID₅₀/ml) | | 2 | S | | S | | S | | | S + LT |
| 4 | 4 | 10,000 | | 2 | S | | S | | S + LT | | | |
| | | (TCID₅₀/ml) | | 2 | S | | S | | S | | | S + LT |

^{a}premix of challenge dose and optimal concentration antibody
^{b}split based on sacrification
^{c}S means swabs; LT means lung tissue after sacrification

[0236] TABLE 20
Scheme for tissue and fluid sampling

| | | Sampling (days) | | | | | | | |
|---|---|---|---|---|---|---|---|---|---|
| Group | No/Group | Challenge/mAb | | −1 | 0 | 1 | 2 | 3 | 4 |
| I | 4 | 1x10E4 TCID₅₀ | ContrAb | B* | B, S | | S | | S, LT |
| II | 4 | 1x10E4 TCID₅₀ | 03-014 | B | B, S | | S | | S, LT |

*B, blood;
S, pharyngeal swab,
LT, lung tissue to be processed for virus titration and pathology

[0237] TABLE 21
List of SARS-CoV strains having a region 318-510
of the S protein not identical to the region 318-510
of the S protein of SARS-CoV Frankfurt 1 strain.

| Mutation | Strain | Genbank |
|---|---|---|
| K344R | GZ02 | AY390556 |
| | GZ60 | AY304491 |
| | JMD | AY394988 |
| | ZS-B | AY394996 |
| | GZ43 | AY304490 |
| | HGZ8L1-A | AY394981 |
| | ZS-A | AY394997 |
| | ZS-C | AY395003 |
| K344R | GD01 | AY278489 |
| F501Y | | |
| K344R | GD03T0013 | AY525636 |
| F360S | | |
| L472P | | |
| D480G | | |
| T487S | | |
| S353F | Sin3408 | AY559083 |
| | Sin3765V | AY559084 |
| | Sin845 | AY559093 |
| | Sin847 | AY559095 |
| | Sin849 | AY559086 |
| | Sin852 | AY559082 |
| | Sin3725V | AY559087 |
| | Sin842 | AY559081 |
| | Sin846 | AY559094 |
| | Sin848 | AY559085 |
| | Sin850 | AY559096 |
| R426G | Shanghai LY | AY322205S3 |
| N437D | | |
| Y436H | GZ-C | AY394979 |
| Y442S | Sino1-11 | AY485277 |
| N479S | BJ302 cl. 2 | AY429073 |
| | BJ302 cl. 4 | AY429075 |
| | BJ302 cl. 6 | AY429077 |
| | BJ302 cl. 3 | AY429074 |
| | BJ302 cl. 5 | AY429076 |
| | BJ302 cl. 8 | AY429079 |

[0238] The amino acid substitutions compared to the Frankfurt 1 S protein are indicated in the left column. Strain and GenBank accession number are indicated in second and third column.

TABLE 22
Concentrations of the monoclonal anti-SARS-CoV antibody
03-014 giving complete protection against 100 TCID50 of
the different SARS-CoV isolates indicated in an in vitro
neutralization assay.

| SARS-CoV | Concentration of 03-014 (μg/ml) resulting |
|---|---|
| Strain* | in 100% protection against 100 TCID50 |
| 36 (3) | 12.5 |
| 39849 (3) | 12.5 |
| 66 (2) | 12.5 |
| 61567 (2) | 12.5 |
| 61644 (1) | 12.5 |
| 61644 (15) | 12.5 |

*Between brackets the passage numbers of the respective strains is indicated

### REFERENCES

[0239] Boel E., S. Verlaan, M. J. Poppelier, N. A. Westerdaal, J. A. Van Strijp and T. Logtenberg (2000), Functional human monoclonal antibodies of all isotypes constructed from phage display library-derived single-chain Fv antibody fragments. J. Immunol. Methods 239:153-166.
[0240] Burton D. R. and C. F. Barbas (1994), Human antibodies from combinatorial libraries. Adv. Immunol. 57:191-280.
[0241] De Kruif J., L. Terstappen, E. Boel and T. Logtenberg (1995a), Rapid selection of cell subpopulation-specific human monoclonal antibodies from a synthetic phage antibody library. Proc. Natl. Acad. Sci. USA 92:3938.
[0242] De Kruif J., E. Boel and T. Logtenberg (1995b), Selection and application of human single-chain Fv antibody fragments from a semi-synthetic phage antibody display library with designed CDR3 regions. J. Mol. Biol. 248:97-105.
[0243] Emini E. A., P. L. Nara, W. A. Schleif, J. A. Lewis, J. P. Davide, D. R. Lee, J. Kessler, S. Conley, S. Matsushita, S. D. J. Putney, R. J. Gerety and J. W. Eichberg, Antibody-mediated in vitro neutralization of human immunodeficiency virus type 1, abolishes infectivity for chimpanzees. J. Virol. 64:3674-3678.
[0244] Fouchier R. A., T. Kuiken, M. Schutten, G. van Amerongen, G. J. van Doornum, B. G. van den Hoogen, M. Peiris, W. Lim, K. Stohr, A. D. Osterhaus (2003), Koch's postulates fulfilled for SARS virus. Nature 243:240.
[0245] Havenga M. J., A. A. Lemckert, J. M. Grimbergen, R. Vogels, L. G. Huisman, D. Valerio, A. Bout and P. H. Quax (2001), Improved adenovirus vectors for infection of cardiovascular tissues. J. Virol. 75:3335-3342.
[0246] Holmes K. V. (2003), SARS coronavirus: a new challenge for prevention and therapy. J. Clin. Invest. 111, 1605-1609.
[0247] Huls G., I. J. Heijnen, E. Cuomo, J. van der Linden, E. Boel, J. van de Winkel and T. Logtenberg (1999), Antitumor immune effector mechanisms recruited by phage display-derived fully human IgG1 and IgA1 monoclonal antibodies. Cancer Res. 59:5778-5784.
   [0248] Ksiazek T. G., D. Erdman, C. S. Goldsmith, S. R. Zaki, T. Peret, S. Emery, S. Tong, C. Urbani, J. A. Corner, W. Lim, P. E. Rollin, S. F. Dowell, A. E. Ling, C. D. Humphrey, W. J. Shieh, J. Guarner, C. D. Paddock, P. Rota, B. Fields, J. DeRisi, J. Y. Yang, N. Cox, J. M. Hughes, J. W. LeDuc, W. J. Bellini, L. J. Anderson (2003), A novel coronavirus associated with severe acute respiratory syndrome. N. Eng. J. Med. 348:1953-1966.
   [0249] Kuiken T., R. A. Fouchier, M. Schutten, G. F. Rimmelzwaan, G. van Amerongen, D. van Riel, J. D. Laman, T. de Jong, G. van Doornum, W. Lim, A. E. Ling, P. K. Chan, J. S. Tam, M. C. Zambon, R. Gopal, C. Drosten, S. van der Werf, N. Escriou, J. C. Manuguerra, K. Stohr, J. S. Peiris and A. D. Osterhaus (2003), Newly discovered coronavirus as the primary cause of severe acute respiratory syndrome. Lancet 362:263-270.
   [0250] Li W., M. J. Moore, N. Vasilieva, J. Sui, S. K. Wong, M. A. Berne, M. Somasundaran, J. L. Sullivan, K. Luzuriaga, T. C. Greenough, H. Choe and M. Farzan (2003), Angiotensin-converting enzyme 2 is a functional receptor for the SARS coronavirus. Nature 2003 426:450-454.
[0251] Marra M. A., S. J. Jones, C. R. Astell, R. A. Holt, A. Brooks-Wilson, Y. S. Butterfield, J. Khattra, J. K. Asano, S. A. Barber, S. Y. Chan, A. Cloutier, S. M. Coughlin, D. Freeman, N. Girn, O. L. Griffith, S. R. Leach, M. Mayo, H. McDonald, S. B. Montgomery, P. K. Pandoh, A. S. Petrescu, A. G. Robertson, J. E. Schein, A. Siddiqui, D. E. Smailus, J. M. Stott, G. S. Yang, F. Plummer, A. Andonov, H. Artsob, N. Bastien, K. Bernard, T. F. Booth, D. Bowness, M. Czub, M. Drebot, L. Fernando, R. Flick, M. Garbutt, M. Gray, A. Grolla, S. Jones, H. Feldmann, A. Meyers, A. Kabani, Y. Li, S. Normand, U. Stroher, G. A. Tipples, S. Tyler, R. Vogrig, D. Ward, B. Watson, R. C. Brunham, M. Krajden, M. Petric, D. M. Skowronski, C. Upton, R. L. Roper (2003), The genome sequence of the SARS-associated coronavirus. Science 300, 1399-1404.
[0252] Rickerts V., T. Wolf, C. Rottmann, W. Preiser, C. Drosten, V. Jakobi, H. H. Leong, H. R. Brodt (2003), Klinik und Behandlung des schweren akuten respiratorischen Syndroms. Dtsch. Med. Wochenschrift 128:1109-1114.
[0253] Rota P. A., M. S. Oberste, S. S. Monroe, W. A. Nix, R. Campagnoli, J. P. Icenogle, S. Penaranda, B. Bankamp, K. Maher, M. H. Chen, S. Tong, A. Tamin, L. Lowe, M. Frace, J. L. DeRisi, Q. Chen, D. Wang, D. D. Erdman, T. C. Peret, C. Burns, T. G. Ksiazek, P. E. Rollin, A. Sanchez, S. Liffick, B. Holloway, J. Limor, K. McCaustland, M. Olsen-Rasmussen, R. Fouchier, S. Gunther, A. D. Osterhaus, C. Drosten, M. A. Pallansch, L. J. Anderson, W. J. Bellini (2003), Characterization of a novel coronavirus associated with severe acute respiratory syndrome. Science 300, 1394-1399.
   [0254] Slootstra J. W., W. C. Puijk, G. J. Ligtvoet, J. P. Langeveld, R. H. Meloen (1996), Structural aspects of antibody-antigen interaction revealed through small random peptide libraries. Mol. Divers. 1, 87-96.
[0255] Ter Meulen J., A. B. H. Bakker, E. N. van den Brink, G. J. Weverling, B. E. E. Martina, B. L. Haagmans, T. Kuiken, J. de Kruif, W. Preiser, W. Spaan, H. R. Gelderblom, J. Goudsmit, A. D. M. E. Osterhaus (2004), Human monoclonal antibody as prophylaxis for SARS coronavirus infection in ferrets. The Lancet 363, 2139-2141.

The application's sequence listing, which the Patent Office published only in electronic form, follows.

SEQUENCE LISTING (478 sequences)

SEQ ID NO: 1 - protein, 9 aa, Artificial sequence
  HCDR3 of SC03-001
HRFRHVFDY

SEQ ID NO: 2 - protein, 11 aa, Artificial sequence
  HCDR3 of SC03-002
YYSRSLKAFDY

SEQ ID NO: 3 - protein, 9 aa, Artificial sequence
  HCDR3 of SC03-003
RSYFRRFDY

SEQ ID NO: 4 - protein, 11 aa, Artificial sequence
  HCDR3 of SC03-005
GGGRPYNPFDY

SEQ ID NO: 5 - protein, 11 aa, Artificial sequence
  HCDR3 of SC03-006
DGSPRTPSFDY

SEQ ID NO: 6 - protein, 11 aa, Artificial sequence
  HCDR3 of SC03-007
GYWTSLTGFDY

SEQ ID NO: 7 - protein, 9 aa, Artificial sequence
  HCDR3 of SC03-008
RVRPRRFDY

SEQ ID NO: 8 - protein, 12 aa, Artificial sequence
  HCDR3 of SC03-009
GLFMVTTYAFDY

SEQ ID NO: 9 - protein, 11 aa, Artificial sequence
  HCDR3 of SC03-010
GGGLPYLSFDY

SEQ ID NO: 10 - protein, 9 aa, Artificial sequence
  HCDR3 of SC03-012
MFRKSSFDS

SEQ ID NO: 11 - protein, 9 aa, Artificial sequence
  HCDR3 of SC03-013
GLTPLYFDY

SEQ ID NO: 12 - protein, 9 aa, Artificial sequence
  HCDR3 of SC03-014
GISPFYFDY

SEQ ID NO: 13 - protein, 6 aa, Artificial sequence
  HCDR3 of SC03-015
GLSLRP

SEQ ID NO: 14 - DNA, 354 bp, Artificial sequence
  CDS (1)..(354): Variable heavu chain of SC03-001
atggctgaggtgcagctggtggagtctgggggaggcttggtaaagcctggggggtccctgagactctcctgtgcagcctctggattcaccttcagcggctactcgatgaactgggtccgccaggcgcccgggaaggggctggagtgggtctcatccattagtggtggtagcacatactacgcagactccaggaagggcagattcaccatctccagagacaattccaagaacacgctgtatcttcagatgaacaacctgagagctgaggacacggctgtgtattactgtgcaagacaccggttccggcacgtcttcgattactggggccagggcaccctggtgaccgtgctcgag

SEQ ID NO: 15 - protein, 118 aa, Artificial sequence
  Variable heavy chain of SC03-001
MAEVQLVESGGGLVKPGGSLRLSCAASGFTFSGYSMNWVRQAPGKGLEWVSSISGGSTYYADSRKGRFTISRDNSKNTLYLQMNNLRAEDTAVYYCARHRFRHVFDYWGQGTLVTVLE

SEQ ID NO: 16 - DNA, 372 bp, Artificial sequence
  CDS (1)..(372): Variable heavy chain of SC03-002
atggctgaggtgcagctggtggagtctgggggaggcctggtcaagcctggggggtccctgagactctcctgtgcagcctctggattcaccttcagcggctacagcatgagctgggtccgccaggcgcccgggaaggggctggagtgggttggccgtactagaaacaaagctaacagttacaccacagaatacgccgcgtctgtgaaaggcagattcaccatctcaagagatgattcaaagaactcactgtatctgcaaatgaacagcctgaaaaccgaggacacggccgtgtattactgtgctagatactactcccgctccctcaaggccttcgattactggggccagggcaccctggtgaccgtgctcgag

SEQ ID NO: 17 - protein, 124 aa, Artificial sequence
  Variable heavy chain of SC03-002
MAEVQLVESGGGLVKPGGSLRLSCAASGFTFSGYSMSWVRQAPGKGLEWVGRTRNKANSYTTEYAASVKGRFTISRDDSKNSLYLQMNSLKTEDTAVYYCARYYSRSLKAFDYWGQGTLVTVLE

SEQ ID NO: 18 - DNA, 360 bp, Artificial sequence
  CDS (1)..(360): Variable heavy chain of SC03-003
atggctgaggtgcagctggtggagtctgggggaggcttggtccagcctggagggtccctgagactctcctgtgcagcctctggattcaccttcagcagctacccgatgaactgggtccgccaggcgcccgggaaggggctggagtgggtctcagctattagtggtagtggtggtagcacatactacgcagactccgtgaagggccggttcaccatctccagagacaattccaagaacacgctgtatctgcaaatgaacagcctgagagccgaggacacggccgtgtattactgtgccagacgcagctacttccgccgcttcgattactggggccagggcaccctggtgaccgtgctcgag

SEQ ID NO: 19 - protein, 120 aa, Artificial sequence
  Variable heavy chain of SC03-003
MAEVQLVESGGGLVQPGGSLRLSCAASGFTFSSYPMNWVRQAPGKGLEWVSAISGSGGSTYYADSVKGRFTISRDNSKNTLYLQMNSLRAEDTAVYYCARRSYFRRFDYWGQGTLVTVLE

SEQ ID NO: 20 - DNA, 360 bp, Artificial sequence
  CDS (1)..(360): Variable heavy chain of SC03-005
atggctgaggtgcagctggtggagtctgggggaggcttgatccagcctggggggtccctgagactctcctgtgcagcctctggattcaccttcagcggctacactatgagctgggtccgccaggcgcccgggcaggggctggagtgggtctcatccattagtggtggtagcacatactacgcagactccaggaagggcagattcaccatctccagagacaattccaagaacacgctgtatcttcaaatgaacaacctgagagctgaggacacggccgtgtattactgtgcaaaaggcggcggccgcccgtacaaccccttcgattactggggccagggcaccctggtgaccgtgctcgag

SEQ ID NO: 21 - protein, 120 aa, Artificial sequence
  Variable heavy chain of SC03-005
MAEVQLVESGGGLIQPGGSLRLSCAASGFTFSGYTMSWVRQAPGQGLEWVSSISGGSTYYADSRKGRFTISRDNSKNTLYLQMNNLRAEDTAVYYCAKGGGRPYNPFDYWGQGTLVTVLE

SEQ ID NO: 22 - DNA, 366 bp, Artificial sequence
  CDS (1)..(366): Variable heavy chain of SC03-006
atggctgaggtgcagctggtggagtctgggggaggcttggtacagcctggggggtccctgagactctcctgtgcagcctctggattcaccttcagcggctaccctatgcactgggtccgccaggcgcccgggaaggggctggagtgggtggcagttatatcatatgacggaagtaataaatactatgcagactccgtgaagggccgattcaccatctccagagacaattccaagaacacgctgtatctgcaaatgaacagcctgagagctgaggacacagctgtgtattactgtgctaaagacggcagcccccgcacccccagcttcgattactggggccagggcaccctggtgaccgtgctcgag

SEQ ID NO: 23 - protein, 122 aa, Artificial sequence
  Variable heavy chain of SC03-006
MAEVQLVESGGGLVQPGGSLRLSCAASGFTFSGYPMHWVRQAPGKGLEWVAVISYDGSNKYYADSVKGRFTISRDNSKNTLYLQMNSLRAEDTAVYYCAKDGSPRTPSFDYWGQGTLVTVLE

SEQ ID NO: 24 - DNA, 366 bp, Artificial sequence
  CDS (1)..(366): Variable heavy chain of SC03-007
atggctgaggtgcagctggtggagtctgggggaggcttggtacagcctagggggtccctgagactctcctgtgcagcctctggattcaccttcagcgactaccggatgaactgggtccgccaggcgcccgggaaggggctggagagggtggcagttatatcatatgatggaagcaataaatactacgcagactccgtgaagggccgattcaccatctccagagacaattccaagaacacgctgtatctgcaaatgaacagcctgagagctgaggacacagccgtgtattactgtgcaagaggctactggacgtcgctcacgggcttcgattactggggccagggcaccctggtgaccgtgctcgag

SEQ ID NO: 25 - protein, 122 aa, Artificial sequence
  Variable heavy chain of SC03-007
MAEVQLVESGGGLVQPRGSLRLSCAASGFTFSDYRMNWVRQAPGKGLERVAVISYDGSNKYYADSVKGRFTISRDNSKNTLYLQMNSLRAEDTAVYYCARGYWTSLTGFDYWGQGTLVTVLE

SEQ ID NO: 26 - DNA, 360 bp, Artificial sequence
  CDS (1)..(360): Variable heavy chain of SC03-008
atggctgaggtgcagctggtggagtctgggggaggcgtggtccagcctgggaggtccctgagactctcctgtgcagcctctggattcaccttcagcagctacccgatgaactgggtccgccaggcgcccgggaaggggctggagtgggtctcagctattagtggtagtggtggtagcacatactacgcagactccgtgaagggccggttcaccatctccagagacaattccaagaacacgctgtatctgcaaatgaacagcctgagagccgaggacacagccgtgtattactgtgcaagacgcgtccgcccccgccgcttcgattattggggccagggcaccctggtgaccgtgctcgag

SEQ ID NO: 27 - protein, 120 aa, Artificial sequence
  Variable heavy chain of SC03-008
MAEVQLVESGGGVVQPGRSLRLSCAASGFTFSSYPMNWVRQAPGKGLEWVSAISGSGGSTYYADSVKGRFTISRDNSKNTLYLQMNSLRAEDTAVYYCARRVRPRRFDYWGQGTLVTVLE

SEQ ID NO: 28 - DNA, 369 bp, Artificial sequence
  CDS (1)..(369): Variable heavy chain of SC03-009
atggctgaggtgcagctggtggagtctgggggaggcgtggtccagcctgggaggtccctgagactctcctgtgcagcctctggattcacctttagcgactaccccatgaactgggtccgccaggcgcccgggaaggggctggagtgggtctcatccattagtggtagtggtggtagcacatactacgcagactccgtgaagggccggttcaccatctccagagacaattccaagaacacgctgtatctgcaaatgaacagcctgagagccgaggacacagccgtgtattactgtgcaaaaggcctcttcatggtcaccacgtacgcgttcgattactggggccagggcaccctggtgaccgtgctcgag

SEQ ID NO: 29 - protein, 123 aa, Artificial sequence
  Variable heavy chain of SC03-009
MAEVQLVESGGGVVQPGRSLRLSCAASGFTFSDYPMNWVRQAPGKGLEWVSSISGSGGSTYYADSVKGRFTISRDNSKNTLYLQMNSLRAEDTAVYYCAKGLFMVTTYAFDYWGQGTLVTVLE

SEQ ID NO: 30 - DNA, 360 bp, Artificial sequence
  CDS (1)..(360): Variable heavy chain of SC03-010
atggctgaggtgcagctggtggagtctgggggaggcgtggtccagcctgggaggtccctgagactctcctgtgcaacctctggattcaccttcagcggctacacgatgcactgggtccgccaggcgcccgggaaggggctggagtgggtctcatccattagtggtggtagcacatactacgcagactccaggaagggcagattcaccatctccagagacaactccaagaacacgctgtatcttcaaatgaacaacctgagagctgaggacacagctgtgtattactgtgcaaaaggcggcggcctcccctacttgagcttcgattactggggccagggcaccctggtgaccgtgctcgag

SEQ ID NO: 31 - protein, 120 aa, Artificial sequence
  Variable heavy chain of SC03-010
MAEVQLVESGGGVVQPGRSLRLSCATSGFTFSGYTMHWVRQAPGKGLEWVSSISGGSTYYADSRKGRFTISRDNSKNTLYLQMNNLRAEDTAVYYCAKGGGLPYLSFDYWGQGTLVTVLE

SEQ ID NO: 32 - DNA, 360 bp, Artificial sequence
  CDS (1)..(360): Variable heavy chain of SC03-012
atggcccaggtgcagctggtgcagtctggggctgaggtgaagaagcctggggcctcagtgaaggtctcctgcaaggcttctggttacacctttaccagctatggtatcagctgggtgcgacaggcccctggacaagggcttgagtggatgggatggatcagcgcttacaatggtaacacaaactatgcacagaagctccagggcagagtcaccatgaccacagacacatccacgagcacagcctacatggagctgagcagcctgagatctgacgacacggccgtgtattactgtgcaaggatgtttaggaagagttcctttgactcctggggccaaggtaccctggtcaccgtctcgaga

SEQ ID NO: 33 - protein, 120 aa, Artificial sequence
  Variable heavy chain of SC03-012
MAQVQLVQSGAEVKKPGASVKVSCKASGYTFTSYGISWVRQAPGQGLEWMGWISAYNGNTNYAQKLQGRVTMTTDTSTSTAYMELSSLRSDDTAVYYCARMFRKSSFDSWGQGTLVTVSR

SEQ ID NO: 34 - DNA, 366 bp, Artificial sequence
  CDS (1)..(366): Variable heavy chain of SC03-013
atggccgaggtgcagctggtggagtctgggggaggcttggtccagcctggagggtccctgagactctcctgtgcagcctctggattcaccttcagtgaccactacatggactgggtccgccaggctccagggaaggggctggagtgggttggccgtactagaaacaaagctaacagttacaccacagaatacgccgcgtctgtgaaaggcagattcaccatctcaagagatgattcaaagaactcactgtatctgcaaatgaacagcctgaaaaccgaggacacggccgtgtattactgtgcaaaggggttgactcctttgtactttgactactggggccaaggtaccctggtcaccgtctcgagt

SEQ ID NO: 35 - protein, 122 aa, Artificial sequence
  Variable heavy chain of SC03-013
MAEVQLVESGGGLVQPGGSLRLSCAASGFTFSDHYMDWVRQAPGKGLEWVGRTRNKANSYTTEYAASVKGRFTISRDDSKNSLYLQMNSLKTEDTAVYYCAKGLTPLYFDYWGQGTLVTVSS

SEQ ID NO: 36 - DNA, 366 bp, Artificial sequence
  CDS (1)..(366): Variable heavy chain of SC03-014
atggccgaggtgcagctggtggagtctgggggaggcttggtccagcctggagggtccctgagactctcctgtgcagcctctggattcaccttcagtgaccactacatggactgggtccgccaggctccagggaaggggctggagtgggttggccgtactagaaacaaagctaacagttacaccacagaatacgccgcgtctgtgaaaggcagattcaccatctcaagagatgattcaaagaactcactgtatctgcaaatgaacagcctgaaaaccgaggacacggccgtgtattactgtgcaagggggatttcgccgttttactttgactactggggccaaggtaccctggtcaccgtctcgagt

SEQ ID NO: 37 - protein, 122 aa, Artificial sequence
  Variable heavy chain of SC03-014
MAEVQLVESGGGLVQPGGSLRLSCAASGFTFSDHYMDWVRQAPGKGLEWVGRTRNKANSYTTEYAASVKGRFTISRDDSKNSLYLQMNSLKTEDTAVYYCARGISPFYFDYWGQGTLVTVSS

SEQ ID NO: 38 - DNA, 351 bp, Artificial sequence
  CDS (1)..(351): Variable heavy chain of SC03-015
atggccgaggtgcagctggtggagtctgggggaggtgtggtacggcctggggggtccctgagactctcctgtgcagcctctggattcacctttgatgattatggcatgagctgggtccgccaagctccagggaaggggctggagtgggtctctggtattaattggaatggtggtagcacaggttatgcagactctgtgaagggccgattcaccatctccagagacaacgccaagaactccctgtatctgcaaatgaacagtctgagagccgaggacacggccgtgtattactgtgcaagaggtttgtctcttcgtccttggggccaaggtaccctggtcaccgtctcgaga

SEQ ID NO: 39 - protein, 117 aa, Artificial sequence
  Variable heavy chain of SC03-015
MAEVQLVESGGGVVRPGGSLRLSCAASGFTFDDYGMSWVRQAPGKGLEWVSGINWNGGSTGYADSVKGRFTISRDNAKNSLYLQMNSLRAEDTAVYYCARGLSLRPWGQGTLVTVSR

SEQ ID NO: 40 - DNA, 318 bp, Artificial sequence
  CDS (1)..(318): Variable light chain of SC03-001, SC03-002, SC03-003, SC03-004, S C03-005, SC03-007, SC03-008, SC03-009, SC03-010, SC03-013, SC03-0 14, SC03-016 and SC03-018
gagctcacccagtctccatcctccctgtctgcatctgtaggagacagagtcaccatcacttgccgggcaagtcagagcattagcagctacttaaattggtatcagcagaaaccagggaaagcccctaagctcctgatctatgctgcatccagtttgcaaagtggggtcccatcaaggttcagtggcagtggatctgggacagatttcactctcaccatcagcagtctgcaacctgaagattttgcaacttactactgtcaacagagttacagtacccctccaacgttcggccaagggaccaaggtggagatcaaacgt

SEQ ID NO: 41 - protein, 106 aa, Artificial sequence
  Variable light chain of SC03-001, SC03-002, SC03-003, SC03-004, S C03-005, SC03-007, SC03-008, SC03-009, SC03-010, SC03-013, SC03-0 14, SC03-016 and SC03-018
ELTQSPSSLSASVGDRVTITCRASQSISSYLNWYQQKPGKAPKLLIYAASSLQSGVPSRFSGSGSGTDFTLTISSLQPEDFATYYCQQSYSTPPTFGQGTKVEIKR

SEQ ID NO: 42 - DNA, 324 bp, Artificial sequence
  CDS (1)..(324): Variable light chain of SC03-006
gacatccagatgactcagtctccacactctctgtctgcatctgtaggagacagagtcaccatcacttgccgggcgagtcagggcattagcaattatttagcctggtatcagcagaaaccagggaaagttcctaagctcctgatctatgctgcatccactttgcaatcaggggtcccatctcggttcagtggcagtggatctgggacagatttcactctcaccatcagcagcctgcagcctgaagatgttggggtttattactgccagcagaggttccgcacgccggtcaccttcggccagggcaccaaactggaaatcaaacgc

SEQ ID NO: 43 - protein, 108 aa, Artificial sequence
  Variable light chain of SC03-006
DIQMTQSPHSLSASVGDRVTITCRASQGISNYLAWYQQKPGKVPKLLIYAASTLQSGVPSRFSGSGSGTDFTLTISSLQPEDVGVYYCQQRFRTPVTFGQGTKLEIKR

SEQ ID NO: 44 - DNA, 324 bp, Artificial sequence
  CDS (1)..(324): Variable light chain of SC03-012 and SC03-015
tctgagctgactcaggaccctgctgtgtctgtggccttgggacagacagtcaggatcacatgccaaggagacagcctcagaagctattatgcaagctggtaccagcagaagccaggacaggcccctgtacttgtcatctatggtaaaaacaaccggccctcagggatcccagaccgattctctggctccagctcaggaaacacagcttccttgaccatcactggggctcaggcggaagatgaggctgactattactgtaactcccgggacagcagtggtaaccatgtggtattcggcggagggaccaagctgaccgtcctaggt

SEQ ID NO: 45 - protein, 108 aa, Artificial sequence
  Variable light chain of SC03-012 and SC03-015
SELTQDPAVSVALGQTVRITCQGDSLRSYYASWYQQKPGQAPVLVIYGKNNRPSGIPDRFSGSSSGNTASLTITGAQAEDEADYYCNSRDSSGNHVVFGGGTKLTVLG

SEQ ID NO: 46 - DNA, 729 bp, Artificial sequence
  CDS (1)..(729): SC03-001
tccatggctgaggtgcagctggtggagtctgggggaggcttggtaaagcctggggggtccctgagactctcctgtgcagcctctggattcaccttcagcggctactcgatgaactgggtccgccaggcgcccgggaaggggctggagtgggtctcatccattagtggtggtagcacatactacgcagactccaggaagggcagattcaccatctccagagacaattccaagaacacgctgtatcttcagatgaacaacctgagagctgaggacacggctgtgtattactgtgcaagacaccggttccggcacgtcttcgattactggggccagggcaccctggtgaccgtgctcgagggtaccggaggttccggcggaaccgggtctgggactggtacgagcgagctcacccagtctccatcctccctgtctgcatctgtaggagacagagtcaccatcacttgccgggcaagtcagagcattagcagctacttaaattggtatcagcagaaaccagggaaagcccctaagctcctgatctatgctgcatccagtttgcaaagtggggtcccatcaaggttcagtggcagtggatctgggacagatttcactctcaccatcagcagtctgcaacctgaagattttgcaacttactactgtcaacagagttacagtacccctccaacgttcggccaagggaccaaggtggagatcaaacgtgcggccgca

SEQ ID NO: 47 - protein, 243 aa, Artificial sequence
  SC03-001
SMAEVQLVESGGGLVKPGGSLRLSCAASGFTFSGYSMNWVRQAPGKGLEWVSSISGGSTYYADSRKGRFTISRDNSKNTLYLQMNNLRAEDTAVYYCARHRFRHVFDYWGQGTLVTVLEGTGGSGGTGSGTGTSELTQSPSSLSASVGDRVTITCRASQSISSYLNWYQQKPGKAPKLLIYAASSLQSGVPSRFSGSGSGTDFTLTISSLQPEDFATYYCQQSYSTPPTFGQGTKVEIKRAAA

SEQ ID NO: 48 - DNA, 747 bp, Artificial sequence
  CDS (1)..(747): SC03-002
tccatggctgaggtgcagctggtggagtctgggggaggcctggtcaagcctggggggtccctgagactctcctgtgcagcctctggattcaccttcagcggctacagcatgagctgggtccgccaggcgcccgggaaggggctggagtgggttggccgtactagaaacaaagctaacagttacaccacagaatacgccgcgtctgtgaaaggcagattcaccatctcaagagatgattcaaagaactcactgtatctgcaaatgaacagcctgaaaaccgaggacacggccgtgtattactgtgctagatactactcccgctccctcaaggccttcgattactggggccagggcaccctggtgaccgtgctcgagggtaccggaggttccggcggaaccgggtctgggactggtacgagcgagctcacccagtctccatcctccctgtctgcatctgtaggagacagagtcaccatcacttgccgggcaagtcagagcattagcagctacttaaattggtatcagcagaaaccagggaaagcccctaagctcctgatctatgctgcatccagtttgcaaagtggggtcccatcaaggttcagtggcagtggatctgggacagatttcactctcaccatcagcagtctgcaacctgaagattttgcaacttactactgtcaacagagttacagtacccctccaacgttcggccaagggaccaaggtggagatcaaacgtgcggccgca

SEQ ID NO: 49 - protein, 249 aa, Artificial sequence
  SC03-002
SMAEVQLVESGGGLVKPGGSLRLSCAASGFTFSGYSMSWVRQAPGKGLEWVGRTRNKANSYTTEYAASVKGRFTISRDDSKNSLYLQMNSLKTEDTAVYYCARYYSRSLKAFDYWGQGTLVTVLEGTGGSGGTGSGTGTSELTQSPSSLSASVGDRVTITCRASQSISSYLNWYQQKPGKAPKLLIYAASSLQSGVPSRFSGSGSGTDFTLTISSLQPEDFATYYCQQSYSTPPTFGQGTKVEIKRAAA

SEQ ID NO: 50 - DNA, 735 bp, Artificial sequence
  CDS (1)..(735): SC03-003
tccatggctgaggtgcagctggtggagtctgggggaggcttggtccagcctggagggtccctgagactctcctgtgcagcctctggattcaccttcagcagctacccgatgaactgggtccgccaggcgcccgggaaggggctggagtgggtctcagctattagtggtagtggtggtagcacatactacgcagactccgtgaagggccggttcaccatctccagagacaattccaagaacacgctgtatctgcaaatgaacagcctgagagccgaggacacggccgtgtattactgtgccagacgcagctacttccgccgcttcgattactggggccagggcaccctggtgaccgtgctcgagggtaccggaggttccggcggaaccgggtctgggactggtacgagcgagctcacccagtctccatcctccctgtctgcatctgtaggagacagagtcaccatcacttgccgggcaagtcagagcattagcagctacttaaattggtatcagcagaaaccagggaaagcccctaagctcctgatctatgctgcatccagtttgcaaagtggggtcccatcaaggttcagtggcagtggatctgggacagatttcactctcaccatcagcagtctgcaacctgaagattttgcaacttactactgtcaacagagttacagtacccctccaacgttcggccaagggaccaaggtggagatcaaacgtgcggccgca

SEQ ID NO: 51 - protein, 245 aa, Artificial sequence
  SC03-003
SMAEVQLVESGGGLVQPGGSLRLSCAASGFTFSSYPMNWVRQAPGKGLEWVSAISGSGGSTYYADSVKGRFTISRDNSKNTLYLQMNSLRAEDTAVYYCARRSYFRRFDYWGQGTLVTVLEGTGGSGGTGSGTGTSELTQSPSSLSASVGDRVTITCRASQSISSYLNWYQQKPGKAPKLLIYAASSLQSGVPSRFSGSGSGTDFTLTISSLQPEDFATYYCQQSYSTPPTFGQGTKVEIKRAAA

SEQ ID NO: 52 - DNA, 735 bp, Artificial sequence
  CDS (1)..(735): SC03-005
tccatggctgaggtgcagctggtggagtctgggggaggcttgatccagcctggggggtccctgagactctcctgtgcagcctctggattcaccttcagcggctacactatgagctgggtccgccaggcgcccgggcaggggctggagtgggtctcatccattagtggtggtagcacatactacgcagactccaggaagggcagattcaccatctccagagacaattccaagaacacgctgtatcttcaaatgaacaacctgagagctgaggacacggccgtgtattactgtgcaaaaggcggcggccgcccgtacaaccccttcgattactggggccagggcaccctggtgaccgtgctcgagggtaccggaggttccggcggaaccgggtctgggactggtacgagcgagctcacccagtctccatcctccctgtctgcatctgtaggagacagagtcaccatcacttgccgggcaagtcagagcattagcagctacttaaattggtatcagcagaaaccagggaaagcccctaagctcctgatctatgctgcatccagtttgcaaagtggggtcccatcaaggttcagtggcagtggatctgggacagatttcactctcaccatcagcagtctgcaacctgaagattttgcaacttactactgtcaacagagttacagtacccctccaacgttcggccaagggaccaaggtggagatcaaacgtgcggccgca

SEQ ID NO: 53 - protein, 245 aa, Artificial sequence
  SC03-005
SMAEVQLVESGGGLIQPGGSLRLSCAASGFTFSGYTMSWVRQAPGQGLEWVSSISGGSTYYADSRKGRFTISRDNSKNTLYLQMNNLRAEDTAVYYCAKGGGRPYNPFDYWGQGTLVTVLEGTGGSGGTGSGTGTSELTQSPSSLSASVGDRVTITCRASQSISSYLNWYQQKPGKAPKLLIYAASSLQSGVPSRFSGSGSGTDFTLTISSLQPEDFATYYCQQSYSTPPTFGQGTKVEIKRAAA

SEQ ID NO: 54 - DNA, 753 bp, Artificial sequence
  CDS (1)..(753): SC03-006
tccatggctgaggtgcagctggtggagtctgggggaggcttggtacagcctggggggtccctgagactctcctgtgcagcctctggattcaccttcagcggctaccctatgcactgggtccgccaggcgcccgggaaggggctggagtgggtggcagttatatcatatgacggaagtaataaatactatgcagactccgtgaagggccgattcaccatctccagagacaattccaagaacacgctgtatctgcaaatgaacagcctgagagctgaggacacagctgtgtattactgtgctaaagacggcagcccccgcacccccagcttcgattactggggccagggcaccctggtgaccgtgctcgagggtaccggaggttccggcggaaccgggtctgggactggtacgagcgagctcgacatccagatgactcagtctccacactctctgtctgcatctgtaggagacagagtcaccatcacttgccgggcgagtcagggcattagcaattatttagcctggtatcagcagaaaccagggaaagttcctaagctcctgatctatgctgcatccactttgcaatcaggggtcccatctcggttcagtggcagtggatctgggacagatttcactctcaccatcagcagcctgcagcctgaagatgttggggtttattactgccagcagaggttccgcacgccggtcaccttcggccagggcaccaaactggaaatcaaacgcgcggccgca

SEQ ID NO: 55 - protein, 251 aa, Artificial sequence
  SC03-006
SMAEVQLVESGGGLVQPGGSLRLSCAASGFTFSGYPMHWVRQAPGKGLEWVAVISYDGSNKYYADSVKGRFTISRDNSKNTLYLQMNSLRAEDTAVYYCAKDGSPRTPSFDYWGQGTLVTVLEGTGGSGGTGSGTGTSELDIQMTQSPHSLSASVGDRVTITCRASQGISNYLAWYQQKPGKVPKLLIYAASTLQSGVPSRFSGSGSGTDFTLTISSLQPEDVGVYYCQQRFRTPVTFGQGTKLEIKRAAA

SEQ ID NO: 56 - DNA, 741 bp, Artificial sequence
  CDS (1)..(741): SC03-007
tccatggctgaggtgcagctggtggagtctgggggaggcttggtacagcctagggggtccctgagactctcctgtgcagcctctggattcaccttcagcgactaccggatgaactgggtccgccaggcgcccgggaaggggctggagagggtggcagttatatcatatgatggaagcaataaatactacgcagactccgtgaagggccgattcaccatctccagagacaattccaagaacacgctgtatctgcaaatgaacagcctgagagctgaggacacagccgtgtattactgtgcaagaggctactggacgtcgctcacgggcttcgattactggggccagggcaccctggtgaccgtgctcgagggtaccggaggttccggcggaaccgggtctgggactggtacgagcgagctcacccagtctccatcctccctgtctgcatctgtaggagacagagtcaccatcacttgccgggcaagtcagagcattagcagctacttaaattggtatcagcagaaaccagggaaagcccctaagctcctgatctatgctgcatccagtttgcaaagtggggtcccatcaaggttcagtggcagtggatctgggacagatttcactctcaccatcagcagtctgcaacctgaagattttgcaacttactactgtcaacagagttacagtacccctccaacgttcggccaagggaccaaggtggagatcaaacgtgcggccgca

SEQ ID NO: 57 - protein, 247 aa, Artificial sequence
  SC03-007
SMAEVQLVESGGGLVQPRGSLRLSCAASGFTFSDYRMNWVRQAPGKGLERVAVISYDGSNKYYADSVKGRFTISRDNSKNTLYLQMNSLRAEDTAVYYCARGYWTSLTGFDYWGQGTLVTVLEGTGGSGGTGSGTGTSELTQSPSSLSASVGDRVTITCRASQSISSYLNWYQQKPGKAPKLLIYAASSLQSGVPSRFSGSGSGTDFTLTISSLQPEDFATYYCQQSYSTPPTFGQGTKVEIKRAAA

SEQ ID NO: 58 - DNA, 735 bp, Artificial sequence
  CDS (1)..(735): SC03-008
tccatggctgaggtgcagctggtggagtctgggggaggcgtggtccagcctgggaggtccctgagactctcctgtgcagcctctggattcaccttcagcagctacccgatgaactgggtccgccaggcgcccgggaaggggctggagtgggtctcagctattagtggtagtggtggtagcacatactacgcagactccgtgaagggccggttcaccatctccagagacaattccaagaacacgctgtatctgcaaatgaacagcctgagagccgaggacacagccgtgtattactgtgcaagacgcgtccgcccccgccgcttcgattattggggccagggcaccctggtgaccgtgctcgagggtaccggaggttccggcggaaccgggtctgggactggtacgagcgagctcacccagtctccatcctccctgtctgcatctgtaggagacagagtcaccatcacttgccgggcaagtcagagcattagcagctacttaaattggtatcagcagaaaccagggaaagcccctaagctcctgatctatgctgcatccagtttgcaaagtggggtcccatcaaggttcagtggcagtggatctgggacagatttcactctcaccatcagcagtctgcaacctgaagattttgcaacttactactgtcaacagagttacagtacccctccaacgttcggccaagggaccaaggtggagatcaaacgtgcggccgca

SEQ ID NO: 59 - protein, 245 aa, Artificial sequence
  SC03-008
SMAEVQLVESGGGVVQPGRSLRLSCAASGFTFSSYPMNWVRQAPGKGLEWVSAISGSGGSTYYADSVKGRFTISRDNSKNTLYLQMNSLRAEDTAVYYCARRVRPRRFDYWGQGTLVTVLEGTGGSGGTGSGTGTSELTQSPSSLSASVGDRVTITCRASQSISSYLNWYQQKPGKAPKLLIYAASSLQSGVPSRFSGSGSGTDFTLTISSLQPEDFATYYCQQSYSTPPTFGQGTKVEIKRAAA

SEQ ID NO: 60 - DNA, 744 bp, Artificial sequence
  CDS (1)..(744): SC03-009
tccatggctgaggtgcagctggtggagtctgggggaggcgtggtccagcctgggaggtccctgagactctcctgtgcagcctctggattcacctttagcgactaccccatgaactgggtccgccaggcgcccgggaaggggctggagtgggtctcatccattagtggtagtggtggtagcacatactacgcagactccgtgaagggccggttcaccatctccagagacaattccaagaacacgctgtatctgcaaatgaacagcctgagagccgaggacacagccgtgtattactgtgcaaaaggcctcttcatggtcaccacgtacgcgttcgattactggggccagggcaccctggtgaccgtgctcgagggtaccggaggttccggcggaaccgggtctgggactggtacgagcgagctcacccagtctccatcctccctgtctgcatctgtaggagacagagtcaccatcacttgccgggcaagtcagagcattagcagctacttaaattggtatcagcagaaaccagggaaagcccctaagctcctgatctatgctgcatccagtttgcaaagtggggtcccatcaaggttcagtggcagtggatctgggacagatttcactctcaccatcagcagtctgcaacctgaagattttgcaacttactactgtcaacagagttacagtacccctccaacgttcggccaagggaccaaggtggagatcaaacgtgcggccgca

SEQ ID NO: 61 - protein, 248 aa, Artificial sequence
  SC03-009
SMAEVQLVESGGGVVQPGRSLRLSCAASGFTFSDYPMNWVRQAPGKGLEWVSSISGSGGSTYYADSVKGRFTISRDNSKNTLYLQMNSLRAEDTAVYYCAKGLFMVTTYAFDYWGQGTLVTVLEGTGGSGGTGSGTGTSELTQSPSSLSASVGDRVTITCRASQSISSYLNWYQQKPGKAPKLLIYAASSLQSGVPSRFSGSGSGTDFTLTISSLQPEDFATYYCQQSYSTPPTFGQGTKVEIKRAAA

SEQ ID NO: 62 - DNA, 735 bp, Artificial sequence
  CDS (1)..(735): SC03-010
tccatggctgaggtgcagctggtggagtctgggggaggcgtggtccagcctgggaggtccctgagactctcctgtgcaacctctggattcaccttcagcggctacacgatgcactgggtccgccaggcgcccgggaaggggctggagtgggtctcatccattagtggtggtagcacatactacgcagactccaggaagggcagattcaccatctccagagacaactccaagaacacgctgtatcttcaaatgaacaacctgagagctgaggacacagctgtgtattactgtgcaaaaggcggcggcctcccctacttgagcttcgattactggggccagggcaccctggtgaccgtgctcgagggtaccggaggttccggcggaaccgggtctgggactggtacgagcgagctcacccagtctccatcctccctgtctgcatctgtaggagacagagtcaccatcacttgccgggcaagtcagagcattagcagctacttaaattggtatcagcagaaaccagggaaagcccctaagctcctgatctatgctgcatccagtttgcaaagtggggtcccatcaaggttcagtggcagtggatctgggacagatttcactctcaccatcagcagtctgcaacctgaagattttgcaacttactactgtcaacagagttacagtacccctccaacgttcggccaagggaccaaggtggagatcaaacgtgcggccgca

SEQ ID NO: 63 - protein, 245 aa, Artificial sequence
  SC03-010
SMAEVQLVESGGGVVQPGRSLRLSCATSGFTFSGYTMHWVRQAPGKGLEWVSSISGGSTYYADSRKGRFTISRDNSKNTLYLQMNNLRAEDTAVYYCAKGGGLPYLSFDYWGQGTLVTVLEGTGGSGGTGSGTGTSELTQSPSSLSASVGDRVTITCRASQSISSYLNWYQQKPGKAPKLLIYAASSLQSGVPSRFSGSGSGTDFTLTISSLQPEDFATYYCQQSYSTPPTFGQGTKVEIKRAAA

SEQ ID NO: 64 - DNA, 741 bp, Artificial sequence
  CDS (1)..(741): SC03-012
gccatggcccaggtgcagctggtgcagtctggggctgaggtgaagaagcctggggcctcagtgaaggtctcctgcaaggcttctggttacacctttaccagctatggtatcagctgggtgcgacaggcccctggacaagggcttgagtggatgggatggatcagcgcttacaatggtaacacaaactatgcacagaagctccagggcagagtcaccatgaccacagacacatccacgagcacagcctacatggagctgagcagcctgagatctgacgacacggccgtgtattactgtgcaaggatgtttaggaagagttcctttgactcctggggccaaggtaccctggtcaccgtctcgagaggtggaggcggttcaggcggaggtggctctggcggtggcggatcgtctgagctgactcaggaccctgctgtgtctgtggccttgggacagacagtcaggatcacatgccaaggagacagcctcagaagctattatgcaagctggtaccagcagaagccaggacaggcccctgtacttgtcatctatggtaaaaacaaccggccctcagggatcccagaccgattctctggctccagctcaggaaacacagcttccttgaccatcactggggctcaggcggaagatgaggctgactattactgtaactcccgggacagcagtggtaaccatgtggtattcggcggagggaccaagctgaccgtcctaggtgcggccgca

SEQ ID NO: 65 - protein, 247 aa, Artificial sequence
  SC03-012
AMAQVQLVQSGAEVKKPGASVKVSCKASGYTFTSYGISWVRQAPGQGLEWMGWISAYNGNTNYAQKLQGRVTMTTDTSTSTAYMELSSLRSDDTAVYYCARMFRKSSFDSWGQGTLVTVSRGGGGSGGGGSGGGGSSELTQDPAVSVALGQTVRITCQGDSLRSYYASWYQQKPGQAPVLVIYGKNNRPSGIPDRFSGSSSGNTASLTITGAQAEDEADYYCNSRDSSGNHVVFGGGTKLTVLGAAA

SEQ ID NO: 66 - DNA, 747 bp, Artificial sequence
  CDS (1)..(747): SC03-013
gccatggccgaggtgcagctggtggagtctgggggaggcttggtccagcctggagggtccctgagactctcctgtgcagcctctggattcaccttcagtgaccactacatggactgggtccgccaggctccagggaaggggctggagtgggttggccgtactagaaacaaagctaacagttacaccacagaatacgccgcgtctgtgaaaggcagattcaccatctcaagagatgattcaaagaactcactgtatctgcaaatgaacagcctgaaaaccgaggacacggccgtgtattactgtgcaaaggggttgactcctttgtactttgactactggggccaaggtaccctggtcaccgtctcgagtggtggaggcggttcaggcggaggtggctctggcggtggcggatcggaaattgagctcacccagtctccatcctccctgtctgcatctgtaggagacagagtcaccatcacttgccgggcaagtcagagcattagcagctacttaaattggtatcagcagaaaccagggaaagcccctaagctcctgatctatgctgcatccagtttgcaaagtggggtcccatcaaggttcagtggcagtggatctgggacagatttcactctcaccatcagcagtctgcaacctgaagattttgcaacttactactgtcaacagagttacagtacccctccaacgttcggccaagggaccaaggtggagatcaaacgtgcggccgca

SEQ ID NO: 67 - protein, 249 aa, Artificial sequence
  SC03-013
AMAEVQLVESGGGLVQPGGSLRLSCAASGFTFSDHYMDWVRQAPGKGLEWVGRTRNKANSYTTEYAASVKGRFTISRDDSKNSLYLQMNSLKTEDTAVYYCAKGLTPLYFDYWGQGTLVTVSSGGGGSGGGGSGGGGSEIELTQSPSSLSASVGDRVTITCRASQSISSYLNWYQQKPGKAPKLLIYAASSLQSGVPSRFSGSGSGTDFTLTISSLQPEDFATYYCQQSYSTPPTFGQGTKVEIKRAAA

SEQ ID NO: 68 - DNA, 747 bp, Artificial sequence
  CDS (1)..(747): SC03-014
gccatggccgaggtgcagctggtggagtctgggggaggcttggtccagcctggagggtccctgagactctcctgtgcagcctctggattcaccttcagtgaccactacatggactgggtccgccaggctccagggaaggggctggagtgggttggccgtactagaaacaaagctaacagttacaccacagaatacgccgcgtctgtgaaaggcagattcaccatctcaagagatgattcaaagaactcactgtatctgcaaatgaacagcctgaaaaccgaggacacggccgtgtattactgtgcaagggggatttcgccgttttactttgactactggggccaaggtaccctggtcaccgtctcgagtggtggaggcggttcaggcggaggtggctctggcggtggcggatcggaaattgagctcacccagtctccatcctccctgtctgcatctgtaggagacagagtcaccatcacttgccgggcaagtcagagcattagcagctacttaaattggtatcagcagaaaccagggaaagcccctaagctcctgatctatgctgcatccagtttgcaaagtggggtcccatcaaggttcagtggcagtggatctgggacagatttcactctcaccatcagcagtctgcaacctgaagattttgcaacttactactgtcaacagagttacagtacccctccaacgttcggccaagggaccaaggtggagatcaaacgtgcggccgca

SEQ ID NO: 69 - protein, 249 aa, Artificial sequence
  SC03-014
AMAEVQLVESGGGLVQPGGSLRLSCAASGFTFSDHYMDWVRQAPGKGLEWVGRTRNKANSYTTEYAASVKGRFTISRDDSKNSLYLQMNSLKTEDTAVYYCARGISPFYFDYWGQGTLVTVSSGGGGSGGGGSGGGGSEIELTQSPSSLSASVGDRVTITCRASQSISSYLNWYQQKPGKAPKLLIYAASSLQSGVPSRFSGSGSGTDFTLTISSLQPEDFATYYCQQSYSTPPTFGQGTKVEIKRAAA

SEQ ID NO: 70 - DNA, 732 bp, Artificial sequence
  CDS (1)..(732): SC03-015
gccatggccgaggtgcagctggtggagtctgggggaggtgtggtacggcctggggggtccctgagactctcctgtgcagcctctggattcacctttgatgattatggcatgagctgggtccgccaagctccagggaaggggctggagtgggtctctggtattaattggaatggtggtagcacaggttatgcagactctgtgaagggccgattcaccatctccagagacaacgccaagaactccctgtatctgcaaatgaacagtctgagagccgaggacacggccgtgtattactgtgcaagaggtttgtctcttcgtccttggggccaaggtaccctggtcaccgtctcgagaggtggaggcggttcaggcggaggtggctctggcggtggcggatcgtctgagctgactcaggaccctgctgtgtctgtggccttgggacagacagtcaggatcacatgccaaggagacagcctcagaagctattatgcaagctggtaccagcagaagccaggacaggcccctgtacttgtcatctatggtaaaaacaaccggccctcagggatcccagaccgattctctggctccagctcaggaaacacagcttccttgaccatcactggggctcaggcggaagatgaggctgactattactgtaactcccgggacagcagtggtaaccatgtggtattcggcggagggaccaagctgaccgtcctaggtgcggccgca

SEQ ID NO: 71 - protein, 244 aa, Artificial sequence
  SC03-015
AMAEVQLVESGGGVVRPGGSLRLSCAASGFTFDDYGMSWVRQAPGKGLEWVSGINWNGGSTGYADSVKGRFTISRDNAKNSLYLQMNSLRAEDTAVYYCARGLSLRPWGQGTLVTVSRGGGGSGGGGSGGGGSSELTQDPAVSVALGQTVRITCQGDSLRSYYASWYQQKPGQAPVLVIYGKNNRPSGIPDRFSGSSSGNTASLTITGAQAEDEADYYCNSRDSSGNHVVFGGGTKLTVLGAAA

SEQ ID NO: 72 - DNA, 55 bp, Artificial sequence
  5' cloning site of pPicZalphaB
tctctcgagaaaagagaggctgaagctgcaggaattcacgtggcccagccggccg

SEQ ID NO: 73 - DNA, 55 bp, Artificial sequence
  5' cloning site of pPicZFVH
tctctcgagaaaagagccatggaagctgcaggaattcacgtggcccagccggccg

SEQ ID NO: 74 - DNA, 92 bp, Artificial sequence
  Synthetic hinge fragment
gcggccgcgccaaagccaagtaccccaccaggttcttcatgtccaccatgtccaggctctggcggtgcgccaatcgatagcggctttctaga

SEQ ID NO: 75 - protein, 11 aa, Artificial sequence
  HCDR3 of SC03-004
DGSRFPARFDY

SEQ ID NO: 76 - protein, 11 aa, Artificial sequence
  HCDR3 of SC03-016
YGSAYRPPFDY

SEQ ID NO: 77 - protein, 9 aa, Artificial sequence
  HCDR3 of SC03-017
SRSAGFFDY

SEQ ID NO: 78 - protein, 9 aa, Artificial sequence
  HCDR3 of SC03-018
FNPFTSFDY

SEQ ID NO: 79 - DNA, 372 bp, Artificial sequence
  CDS (1)..(372): Variable heavy chain of SC03-004
atggctgaggtgcagctggtggagtctgggggaggcttggtacagcctggggggtccctgagactctcctgtgcagcctctggattcacctttagcgactacttgatgaactgggtccgccaggcgcccgggaaggggctggagtgggttggccgtattagaagcaaagctaacagttacgcgacagcatatgctgcgtcggtgaaaggcaggttcaccatctccagagatgattcaaagaacacggcgtatctgcaaatgaacagcctgaaaaccgaggacacggccgtgtattactgtgctaaagacggcagccggttccccgcccgcttcgattactggggccagggcaccctggtgaccgtgctcgag

SEQ ID NO: 80 - protein, 124 aa, Artificial sequence
  Variable heavy chain of SC03-004
MAEVQLVESGGGLVQPGGSLRLSCAASGFTFSDYLMNWVRQAPGKGLEWVGRIRSKANSYATAYAASVKGRFTISRDDSKNTAYLQMNSLKTEDTAVYYCAKDGSRFPARFDYWGQGTLVTVLE

SEQ ID NO: 81 - DNA, 372 bp, Artificial sequence
  Variable heavy chain of SC03-016
atggctgaggtgtagctggtggagtctgggggaggcttggtccagcctggagggtccctgagactctcccgtgcagcctctggattcacctttagcaactaccccatgcgctgggtccgccaggcgcccgggaaggggctggagtgggtaggtttcattagaaacaaagctaatggtgggacaacagaatagaccacgtctgtgagaggcagattcacaatctcaagagatgattccaaaagcatcacctatctgcaaatgaacagcctgagagccgaggacacagccgtgtattactgtgctaaatacggcagcgcctaccgcccgcccttcgattactggggccagggcaccctggtgaccgtgctcgag

SEQ ID NO: 82 - protein, 125 aa, Artificial sequence
  Variable heavy chain of SC03-016
AMAEVQLVESGGGLVQPGGSLRLSRAASGFTFSNYPMRWVRQAPGKGLEWVGFIRNKANGGTTEQTTSVRGRFTISRDDSKSITYLQMNSLRAEDTAVYYCAKYGSAYRPPFDYWGQGTLVTVLE

SEQ ID NO: 83 - DNA, 363 bp, Artificial sequence
  CDS (1)..(363): Variable heavy chain of SC03-017
atggcccaggtgcagctgcaggagtcgggcgcaggactgttgaagccttcggagaccctgtccctcacctgcactgtctctggtggctccgtcagcagtggtagttactactggagctggatccggcagcccccagggaagggactggagtggattgggtatatctattacagtgggagcaccaactacaacccctccctcaagagtcgagtcaccatatcagtagacacgtccaagaaccagttctccctgaagctgagctctgtgaccgctgcggacacggccgtgtattactgtgcaaagtctcgttctgctggtttctttgactactggggccaaggtaccctggtcaccgtctcgagt

SEQ ID NO: 84 - protein, 121 aa, Artificial sequence
  Variable heavy chain of SC03-017
MAQVQLQESGAGLLKPSETLSLTCTVSGGSVSSGSYYWSWIRQPPGKGLEWIGYIYYSGSTNYNPSLKSRVTISVDTSKNQFSLKLSSVTAADTAVYYCAKSRSAGFFDYWGQGTLVTVSS

SEQ ID NO: 85 - DNA, 360 bp, Artificial sequence
  CDS (1)..(360): Variable heavy chain of SC03-018
atggccgaggtgcagctggtggagtctgggggaggcttggtacagcctggggggtccctgagactctcctgtgcagcctctggattcacctttagcagctatgccatgagctgggtccgccaggctccagggaaggggctggagtgggtctcagctattagtggtagtggtggtagcacatactacgcagactccgtgaagggccggttcaccatctccagagacaattccaagaacacgctgtatctgcaaatgaacagcctgagagccgaggacacggccgtgtattactgtgcaaagtttaatccgtttacttcctttgactactggggccaaggtaccctggtcaccgtctcgagt

SEQ ID NO: 86 - protein, 120 aa, Artificial sequence
  Variable heavy chain of SC03-018
MAEVQLVESGGGLVQPGGSLRLSCAASGFTFSSYAMSWVRQAPGKGLEWVSAISGSGGSTYYADSVKGRFTISRDNSKNTLYLQMNSLRAEDTAVYYCAKFNPFTSFDYWGQGTLVTVSS

SEQ ID NO: 87 - DNA, 324 bp, Artificial sequence
  CDS (1)..(324): Variable light chain of SC03-017
gaaattgagctcacacagtctccagccaccctgtctttgtctccaggggaaagagccaccctctcctgcagggccagtcagagtgttagcagctacttagcctggtaccaacagaaacctggccaggctcccaggctcctcatctatgatgcatccaacagggccactggcatcccagccaggttcagtggcagtgggtctgggacagacttcactctcaccatcagcagcctagagcctgaagattttgcagtttattactgtcagcagcgtagcaactggcctccggctttcggcggagggaccaaggtggagatcaaacgt

SEQ ID NO: 88 - protein, 108 aa, Artificial sequence
  Variable light chain of SC03-017
EIELTQSPATLSLSPGERATLSCRASQSVSSYLAWYQQKPGQAPRLLIYDASNRATGIPARFSGSGSGTDFTLTISSLEPEDFAVYYCQQRSNWPPAFGGGTKVEIKR

SEQ ID NO: 89 - DNA, 747 bp, Artificial sequence
  CDS (1)..(747): SC03-004
tccatggctgaggtgcagctggtggagtctgggggaggcttggtacagcctggggggtccctgagactctcctgtgcagcctctggattcacctttagcgactacttgatgaactgggtccgccaggcgcccgggaaggggctggagtgggttggccgtattagaagcaaagctaacagttacgcgacagcatatgctgcgtcggtgaaaggcaggttcaccatctccagagatgattcaaagaacacggcgtatctgcaaatgaacagcctgaaaaccgaggacacggccgtgtattactgtgctaaagacggcagccggttccccgcccgcttcgattactggggccagggcaccctggtgaccgtgctcgagggtaccggaggttccggcggaaccgggtctgggactggtacgagcgagctcacccagtctccatcctccctgtctgcatctgtaggagacagagtcaccatcacttgccgggcaagtcagagcattagcagctacttaaattggtatcagcagaaaccagggaaagcccctaagctcctgatctatgctgcatccagtttgcaaagtggggtcccatcaaggttcagtggcagtggatctgggacagatttcactctcaccatcagcagtctgcaacctgaagattttgcaacttactactgtcaacagagttacagtacccctccaacgttcggccaagggaccaaggtggagatcaaacgtgcggccgca

SEQ ID NO: 90 - protein, 249 aa, Artificial sequence
  SC03-004
SMAEVQLVESGGGLVQPGGSLRLSCAASGFTFSDYLMNWVRQAPGKGLEWVGRIRSKANSYATAYAASVKGRFTISRDDSKNTAYLQMNSLKTEDTAVYYCAKDGSRFPARFDYWGQGTLVTVLEGTGGSGGTGSGTGTSELTQSPSSLSASVGDRVTITCRASQSISSYLNWYQQKPGKAPKLLIYAASSLQSGVPSRFSGSGSGTDFTLTISSLQPEDFATYYCQQSYSTPPTFGQGTKVEIKRAAA

SEQ ID NO: 91 - DNA, 747 bp, Artificial sequence
  SC03-016
gccatggctgaggtgtagctggtggagtctgggggaggcttggtccagcctggagggtccctgagactctcccgtgcagcctctggattcacctttagcaactaccccatgcgctgggtccgccaggcgcccgggaaggggctggagtgggtaggtttcattagaaacaaagctaatggtgggacaacagaatagaccacgtctgtgagaggcagattcacaatctcaagagatgattccaaaagcatcacctatctgcaaatgaacagcctgagagccgaggacacagccgtgtattactgtgctaaatacggcagcgcctaccgcccgcccttcgattactggggccagggcaccctggtgaccgtgctcgagggtaccggaggttccggcggaaccgggtctgggactggtacgagcgagctcacccagtctccatcctccctgtctgcatctgtaggagacagagtcaccatcacttgccgggcaagtcagagcattagcagctacttaaattggtatcagcagaaaccagggaaagcccctaagctcctgatctatgctgcatccagtttgcaaagtggggtcccatcaaggttcagtggcagtggatctgggacagatttcactctcaccatcagcagtctgcaacctgaagattttgcaacttactactgtcaacagagttacagtacccctccaacgttcggccaagggaccaaggtggagatcaaacgtgcggccgca

SEQ ID NO: 92 - protein, 249 aa, Artificial sequence
  SC03-016
AMAEVQLVESGGGLVQPGGSLRLSRAASGFTFSNYPMRWVRQAPGKGLEWVGFIRNKANGGTTEQTTSVRGRFTISRDDSKSITYLQMNSLRAEDTAVYYCAKYGSAYRPPFDYWGQGTLVTVLEGTGGSGGTGSGTGTSELTQSPSSLSASVGDRVTITCRASQSISSYLNWYQQKPGKAPKLLIYAASSLQSGVPSRFSGSGSGTDFTLTISSLQPEDFATYYCQQSYSTPPTFGQGTKVEIKRAAA

SEQ ID NO: 93 - DNA, 744 bp, Artificial sequence
  CDS (1)..(744): SC03-017
gccatggcccaggtgcagctgcaggagtcgggcgcaggactgttgaagccttcggagaccctgtccctcacctgcactgtctctggtggctccgtcagcagtggtagttactactggagctggatccggcagcccccagggaagggactggagtggattgggtatatctattacagtgggagcaccaactacaacccctccctcaagagtcgagtcaccatatcagtagacacgtccaagaaccagttctccctgaagctgagctctgtgaccgctgcggacacggccgtgtattactgtgcaaagtctcgttctgctggtttctttgactactggggccaaggtaccctggtcaccgtctcgagtggtggaggcggttcaggcggaggtggctctggcggtggcggatcggaaattgagctcacacagtctccagccaccctgtctttgtctccaggggaaagagccaccctctcctgcagggccagtcagagtgttagcagctacttagcctggtaccaacagaaacctggccaggctcccaggctcctcatctatgatgcatccaacagggccactggcatcccagccaggttcagtggcagtgggtctgggacagacttcactctcaccatcagcagcctagagcctgaagattttgcagtttattactgtcagcagcgtagcaactggcctccggctttcggcggagggaccaaggtggagatcaaacgtgcggccgca

SEQ ID NO: 94 - protein, 248 aa, Artificial sequence
  SC03-017
AMAQVQLQESGAGLLKPSETLSLTCTVSGGSVSSGSYYWSWIRQPPGKGLEWIGYIYYSGSTNYNPSLKSRVTISVDTSKNQFSLKLSSVTAADTAVYYCAKSRSAGFFDYWGQGTLVTVSSGGGGSGGGGSGGGGSEIELTQSPATLSLSPGERATLSCRASQSVSSYLAWYQQKPGQAPRLLIYDASNRATGIPARFSGSGSGTDFTLTISSLEPEDFAVYYCQQRSNWPPAFGGGTKVEIKRAAA

SEQ ID NO: 95 - DNA, 741 bp, Artificial sequence
  CDS (1)..(741): SC03-018
gccatggccgaggtgcagctggtggagtctgggggaggcttggtacagcctggggggtccctgagactctcctgtgcagcctctggattcacctttagcagctatgccatgagctgggtccgccaggctccagggaaggggctggagtgggtctcagctattagtggtagtggtggtagcacatactacgcagactccgtgaagggccggttcaccatctccagagacaattccaagaacacgctgtatctgcaaatgaacagcctgagagccgaggacacggccgtgtattactgtgcaaagtttaatccgtttacttcctttgactactggggccaaggtaccctggtcaccgtctcgagtggtggaggcggttcaggcggaggtggctctggcggtggcggatcggaaattgagctcacccagtctccatcctccctgtctgcatctgtaggagacagagtcaccatcacttgccgggcaagtcagagcattagcagctacttaaattggtatcagcagaaaccagggaaagcccctaagctcctgatctatgctgcatccagtttgcaaagtggggtcccatcaaggttcagtggcagtggatctgggacagatttcactctcaccatcagcagtctgcaacctgaagattttgcaacttactactgtcaacagagttacagtacccctccaacgttcggccaagggaccaaggtggagatcaaacgtgcggccgca

SEQ ID NO: 96 - protein, 247 aa, Artificial sequence
  SC03-018
AMAEVQLVESGGGLVQPGGSLRLSCAASGFTFSSYAMSWVRQAPGKGLEWVSAISGSGGSTYYADSVKGRFTISRDNSKNTLYLQMNSLRAEDTAVYYCAKFNPFTSFDYWGQGTLVTVSSGGGGSGGGGSGGGGSEIELTQSPSSLSASVGDRVTITCRASQSISSYLNWYQQKPGKAPKLLIYAASSLQSGVPSRFSGSGSGTDFTLTISSLQPEDFATYYCQQSYSTPPTFGQGTKVEIKRAAA

SEQ ID NO: 97 - protein, 15 aa, Artificial sequence
  Peptide
NGPQSNQRSAPRITF

SEQ ID NO: 98 - protein, 15 aa, Artificial sequence
  Peptide
GPQSNQRSAPRITFG

SEQ ID NO: 99 - protein, 15 aa, Artificial sequence
  Peptide
PQSNQRSAPRITFGG

SEQ ID NO: 100 - protein, 15 aa, Artificial sequence
  Peptide
QSNQRSAPRITFGGP

SEQ ID NO: 101 - protein, 15 aa, Artificial sequence
  Peptide
SNQRSAPRITFGGPT

SEQ ID NO: 102 - protein, 15 aa, Artificial sequence
  Peptide
NQRSAPRITFGGPTD

SEQ ID NO: 103 - protein, 15 aa, Artificial sequence
  Peptide
QRSAPRITFGGPTDS

SEQ ID NO: 104 - protein, 15 aa, Artificial sequence
  Peptide
RSAPRITFGGPTDST

SEQ ID NO: 105 - protein, 15 aa, Artificial sequence
  Peptide
SAPRITFGGPTDSTD

SEQ ID NO: 106 - protein, 15 aa, Artificial sequence
  Peptide
APRITFGGPTDSTDN

SEQ ID NO: 107 - protein, 15 aa, Artificial sequence
  Peptide
PRITFGGPTDSTDNN

SEQ ID NO: 108 - protein, 15 aa, Artificial sequence
  Peptide
RITFGGPTDSTDNNQ

SEQ ID NO: 109 - protein, 15 aa, Artificial sequence
  Peptide
ITFGGPTDSTDNNQN

SEQ ID NO: 110 - DNA, 6778 bp, Artificial sequence
  Vector pSyn-C03-HCgamma1
gacggatcgggagatctcccgatcccctatggtgcactctcagtacaatctgctctgatgccgcatagttaagccagtatctgctccctgcttgtgtgttggaggtcgctgagtagtgcgcgagcaaaatttaagctacaacaaggcaaggcttgaccgacaattgcatgaagaatctgcttagggttaggcgttttgcgctgcttcgctaggtggtcaatattggccattagccatattattcattggttatatagcataaatcaatattggctattggccattgcatacgttgtatccatatcataatatgtacatttatattggctcatgtccaacattaccgccatgttgacattgattattgactagttattaatagtaatcaattacggggtcattagttcatagcccatatatggagttccgcgttacataacttacggtaaatggcccgcctggctgaccgcccaacgacccccgcccattgacgtcaataatgacgtatgttcccatagtaacgccaatagggactttccattgacgtcaatgggtggagtatttacggtaaactgcccacttggcagtacatcaagtgtatcatatgccaagtacgccccctattgacgtcaatgacggtaaatggcccgcctggcattatgcccagtacatgaccttatgggactttcctacttggcagtacatctacgtattagtcatcgctattaccatggtgatgcggttttggcagtacatcaatgggcgtggatagcggtttgactcacggggatttccaagtctccaccccattgacgtcaatgggagtttgttttggcaccaaaatcaacgggactttccaaaatgtcgtaacaactccgccccattgacgcaaatgggcggtaggcgtgtacggtgggaggtctatataagcagagctcgtttagtgaaccgtcagatcgcctggagacgccatccacgctgttttgacctccatagaagacaccgggaccgatccagcctccgcggccgggaacggtgcattggaagctggcctggatggcctgactctcttaggtagccttgcagaagttggtcgtgaggcactgggcaggtaagtatcaaggttacaagacaggtttaaggagatcaatagaaactgggcttgtcgagacagagaagactcttgcgtttctgataggcacctattggtcttactgacatccactttgcctttctctccacaggtgtccactcccagttcaattacagctcgccaccatggcctgccccggcttcctgtgggccctggtgatcagcacctgcctggaattcagcatgagcagcgctagcaccaagggccccagcgtgttccccctggcccccagcagcaagagcaccagcggcggcacagccgccctgggctgcctggtgaaggactacttccccgagcccgtgaccgtgagctggaacagcggcgccttgaccagcggcgtgcacaccttccccgccgtgctgcagagcagcggcctgtacagcctgagcagcgtggtgaccgtgcccagcagcagcctgggcacccagacctacatctgcaacgtgaaccacaagcccagcaacaccaaggtggacaaacgcgtggagcccaagagctgcgacaagacccacacctgccccccctgccctgcccccgagctgctgggcggaccctccgtgttcctgttcccccccaagcccaaggacaccctcatgatcagccggacccccgaggtgacctgcgtggtggtggacgtgagccacgaggaccccgaggtgaagttcaactggtacgtggacggcgtggaggtgcacaacgccaagaccaagccccgggaggagcagtacaacagcacctaccgggtggtgagcgtgctcaccgtgctgcaccaggactggctgaacggcaaggagtacaagtgcaaggtgagcaacaaggccctgcctgcccccatcgagaagaccatcagcaaggccaagggccagccccgggagccccaggtgtacaccctgccccccagccgggaggagatgaccaagaaccaggtgtccctcacctgtctggtgaagggcttctaccccagcgacatcgccgtggagtgggagagcaacggccagcccgagaacaactacaagaccaccccccctgtgctggacagcgacggcagcttcttcctgtacagcaagctcaccgtggacaagagccggtggcagcagggcaacgtgttcagctgcagcgtgatgcacgaggccctgcacaaccactacacccagaagagcctgagcctgagccccggcaagtgataatctagagggcccgtttaaacccgctgatcagcctcgactgtgccttctagttgccagccatctgttgtttgcccctcccccgtgccttccttgaccctggaaggtgccactcccactgtcctttcctaataaaatgaggaaattgcatcgcattgtctgagtaggtgtcattctattctggggggtggggtggggcaggacagcaagggggaggattgggaagacaatagcaggcatgctggggatgcggtgggctctatggcttctgaggcggaaagaaccagctggggctctagggggtatccccacgcgccctgtagcggcgcattaagcgcggcgggtgtggtggttacgcgcagcgtgaccgctacacttgccagcgccctagcgcccgctcctttcgctttcttcccttcctttctcgccacgttcgccggctttccccgtcaagctctaaatcgggggctccctttagggttccgatttagtgctttacggcacctcgaccccaaaaaacttgattagggtgatggttcacgtagtgggccatcgccctgatagacggtttttcgccctttgacgttggagtccacgttctttaatagtggactcttgttccaaactggaacaacactcaaccctatctcggtctattcttttgatttataagggattttgccgatttcggcctattggttaaaaaatgagctgatttaacaaaaatttaacgcgaattaattctgtggaatgtgtgtcagttagggtgtggaaagtccccaggctccccagcaggcagaagtatgcaaagcatgcatctcaattagtcagcaaccaggtgtggaaagtccccaggctccccagcaggcagaagtatgcaaagcatgcatctcaattagtcagcaaccatagtcccgcccctaactccgcccatcccgcccctaactccgcccagttccgcccattctccgccccatggctgactaattttttttatttatgcagaggccgaggccgcctctgcctctgagctattccagaagtagtgaggaggcttttttggaggcctaggcttttgcaaaaagctcccgggagcttgtatatccattttcggatctgatcaagagacaggatgaggatcgtttcgcatgattgaacaagatggattgcacgcaggttctccggccgcttgggtggagaggctattcggctatgactgggcacaacagacaatcggctgctctgatgccgccgtgttccggctgtcagcgcaggggcgcccggttctttttgtcaagaccgacctgtccggtgccctgaatgaactgcaggacgaggcagcgcggctatcgtggctggccacgacgggcgttccttgcgcagctgtgctcgacgttgtcactgaagcgggaagggactggctgctattgggcgaagtgccggggcaggatctcctgtcatctcaccttgctcctgccgagaaagtatccatcatggctgatgcaatgcggcggctgcatacgcttgatccggctacctgcccattcgaccaccaagcgaaacatcgcatcgagcgagcacgtactcggatggaagccggtcttgtcgatcaggatgatctggacgaagagcatcaggggctcgcgccagccgaactgttcgccaggctcaaggcgcgcatgcccgacggcgaggatctcgtcgtgacccatggcgatgcctgcttgccgaatatcatggtggaaaatggccgcttttctggattcatcgactgtggccggctgggtgtggcggatcgctatcaggacatagcgttggctacccgtgatattgctgaagagcttggcggcgaatgggctgaccgcttcctcgtgctttacggtatcgccgctcccgattcgcagcgcatcgccttctatcgccttcttgacgagttcttctgagcgggactctggggttcgaaatgaccgaccaagcgacgcccaacctgccatcacgagatttcgattccaccgccgccttctatgaaaggttgggcttcggaatcgttttccgggacgccggctggatgatcctccagcgcggggatctcatgctggagttcttcgcccaccccaacttgtttattgcagcttataatggttacaaataaagcaatagcatcacaaatttcacaaataaagcatttttttcactgcattctagttgtggtttgtccaaactcatcaatgtatcttatcatgtctgtataccgtcgacctctagctagagcttggcgtaatcatggtcatagctgtttcctgtgtgaaattgttatccgctcacaattccacacaacatacgagccggaagcataaagtgtaaagcctggggtgcctaatgagtgagctaactcacattaattgcgttgcgctcactgcccgctttccagtcgggaaacctgtcgtgccagctgcattaatgaatcggccaacgcgcggggagaggcggtttgcgtattgggcgctcttccgcttcctcgctcactgactcgctgcgctcggtcgttcggctgcggcgagcggtatcagctcactcaaaggcggtaatacggttatccacagaatcaggggataacgcaggaaagaacatgtgagcaaaaggccagcaaaaggccaggaaccgtaaaaaggccgcgttgctggcgtttttccataggctccgcccccctgacgagcatcacaaaaatcgacgctcaagtcagaggtggcgaaacccgacaggactataaagataccaggcgtttccccctggaagctccctcgtgcgctctcctgttccgaccctgccgcttaccggatacctgtccgcctttctcccttcgggaagcgtggcgctttctcatagctcacgctgtaggtatctcagttcggtgtaggtcgttcgctccaagctgggctgtgtgcacgaaccccccgttcagcccgaccgctgcgccttatccggtaactatcgtcttgagtccaacccggtaagacacgacttatcgccactggcagcagccactggtaacaggattagcagagcgaggtatgtaggcggtgctacagagttcttgaagtggtggcctaactacggctacactagaagaacagtatttggtatctgcgctctgctgaagccagttaccttcggaaaaagagttggtagctcttgatccggcaaacaaaccaccgctggtagcggtttttttgtttgcaagcagcagattacgcgcagaaaaaaaggatctcaagaagatcctttgatcttttctacggggtctgacgctcagtggaacgaaaactcacgttaagggattttggtcatgagattatcaaaaaggatcttcacctagatccttttaaattaaaaatgaagttttaaatcaatctaaagtatatatgagtaaacttggtctgacagttaccaatgcttaatcagtgaggcacctatctcagcgatctgtctatttcgttcatccatagttgcctgactccccgtcgtgtagataactacgatacgggagggcttaccatctggccccagtgctgcaatgataccgcgagacccacgctcaccggctccagatttatcagcaataaaccagccagccggaagggccgagcgcagaagtggtcctgcaactttatccgcctccatccagtctattaattgttgccgggaagctagagtaagtagttcgccagttaatagtttgcgcaacgttgttgccattgctacaggcatcgtggtgtcacgctcgtcgtttggtatggcttcattcagctccggttcccaacgatcaaggcgagttacatgatcccccatgttgtgcaaaaaagcggttagctccttcggtcctccgatcgttgtcagaagtaagttggccgcagtgttatcactcatggttatggcagcactgcataattctcttactgtcatgccatccgtaagatgcttttctgtgactggtgagtactcaaccaagtcattctgagaatagtgtatgcggcgaccgagttgctcttgcccggcgtcaatacgggataataccgcgccacatagcagaactttaaaagtgctcatcattggaaaacgttcttcggggcgaaaactctcaaggatcttaccgctgttgagatccagttcgatgtaacccactcgtgcacccaactgatcttcagcatcttttactttcaccagcgtttctgggtgagcaaaaacaggaaggcaaaatgccgcaaaaaagggaataagggcgacacggaaatgttgaatactcatactcttcctttttcaatattattgaagcatttatcagggttattgtctcatgagcggatacatatttgaatgtatttagaaaaataaacaaataggggttccgcgcacatttccccgaaaagtgccacctgacgtc

SEQ ID NO: 111 - DNA, 6267 bp, Artificial sequence
  Vector pSyn-C05-Ckappa
gacggatcgggagatctcccgatcccctatggtgcactctcagtacaatctgctctgatgccgcatagttaagccagtatctgctccctgcttgtgtgttggaggtcgctgagtagtgcgcgagcaaaatttaagctacaacaaggcaaggcttgaccgacaattgttaattaacatgaagaatctgcttagggttaggcgttttgcgctgcttcgctaggtggtcaatattggccattagccatattattcattggttatatagcataaatcaatattggctattggccattgcatacgttgtatccatatcataatatgtacatttatattggctcatgtccaacattaccgccatgttgacattgattattgactagttattaatagtaatcaattacggggtcattagttcatagcccatatatggagttccgcgttacataacttacggtaaatggcccgcctggctgaccgcccaacgacccccgcccattgacgtcaataatgacgtatgttcccatagtaacgccaatagggactttccattgacgtcaatgggtggagtatttacggtaaactgcccacttggcagtacatcaagtgtatcatatgccaagtacgccccctattgacgtcaatgacggtaaatggcccgcctggcattatgcccagtacatgaccttatgggactttcctacttggcagtacatctacgtattagtcatcgctattaccatggtgatgcggttttggcagtacatcaatgggcgtggatagcggtttgactcacggggatttccaagtctccaccccattgacgtcaatgggagtttgttttggcaccaaaatcaacgggactttccaaaatgtcgtaacaactccgccccattgacgcaaatgggcggtaggcgtgtacggtgggaggtctatataagcagagctcgtttagtgaaccgtcagatcgcctggagacgccatccacgctgttttgacctccatagaagacaccgggaccgatccagcctccgcggccgggaacggtgcattggaatcgatgactctcttaggtagccttgcagaagttggtcgtgaggcactgggcaggtaagtatcaaggttacaagacaggtttaaggagatcaatagaaactgggcttgtcgagacagagaagactcttgcgtttctgataggcacctattggtcttactgacatccactttgcctttctctccacaggtgtccactcccagttcaattacagctcgccaccatggcctgccccggcttcctgtgggccctggtgatcagcacctgcctcgagttcagcggccctaagcggaccgtggccgctcccagcgtgttcatcttccccccctccgacgagcagctgaagagcggcaccgccagcgtggtgtgcctgctgaacaacttctacccccgggaggccaaggtgcagtggaaggtggacaacgccctgcagagcggcaacagccaggagagcgtgaccgagcaggacagcaaggactccacctacagcctgagcagcaccctcaccctgagcaaggccgactacgagaagcacaaggtgtacgcctgcgaggtgacccaccagggcctgagcagccccgtgaccaagagcttcaaccggggcgagtgttaatagacttaagtttaaaccgctgatcagcctcgactgtgccttctagttgccagccatctgttgtttgcccctcccccgtgccttccttgaccctggaaggtgccactcccactgtcctttcctaataaaatgaggaaattgcatcgcattgtctgagtaggtgtcattctattctggggggtggggtggggcaggacagcaagggggaggattgggaagacaatagcaggcatgctggggatgcggtgggctctatggcttctgaggcggaaagaaccagctggggctctagggggtatccccacgcgccctgtagcggcgcattaagcgcggcgggtgtggtggttacgcgcagcgtgaccgctacacttgccagcgccctagcgcccgctcctttcgctttcttcccttcctttctcgccacgttcgccggctttccccgtcaagctctaaatcgggggctccctttagggttccgatttagtgctttacggcacctcgaccccaaaaaacttgattagggtgatggttcacgtagtgggccatcgccctgatagacggtttttcgccctttgacgttggagtccacgttctttaatagtggactcttgttccaaactggaacaacactcaaccctatctcggtctattcttttgatttataagggattttggccatttcggcctattggttaaaaaatgagctgatttaacaaaaatttaacgcgaattaattctgtggaatgtgtgtcagttagggtgtggaaagtccccaggctccccagcaggcagaagtatgcaaagcatgcatctcaattagtcagcaaccaggtgtggaaagtccccaggctccccagcaggcagaagtatgcaaagcatgcatctcaattagtcagcaaccatagtcccgcccctaactccgcccatcccgcccctaactccgcccagttccgcccattctccgccccatggctgactaattttttttatttatgcagaggccgaggccgcctctgcctctgagctattccagaagtagtgaggaggcttttttggaggcctaggcttttgcaaaaagctcccgggagcttgtatatccattttcggatctgatcagcacgtgatgaaaaagcctgaactcaccgcgacgtctgtcgagaagtttctgatcgaaaagttcgacagcgtctccgacctgatgcagctctcggagggcgaagaatctcgtgctttcagcttcgatgtaggagggcgtggatatgtcctgcgggtaaatagctgcgccgatggtttctacaaagatcgttatgtttatcggcactttgcatcggccgcgctcccgattccggaagtgcttgacattggggaattcagcgagagcctgacctattgcatctcccgccgtgcacagggtgtcacgttgcaagacctgcctgaaaccgaactgcccgctgttctgcagccggtcgcggaggccatggatgcgatcgctgcggccgatcttagccagacgagcgggttcggcccattcggaccacaaggaatcggtcaatacactacatggcgtgatttcatatgcgcgattgctgatccccatgtgtatcactggcaaactgtgatggacgacaccgtcagtgcgtccgtcgcgcaggctctcgatgagctgatgctttgggccgaggactgccccgaagtccggcacctcgtgcacgcggatttcggctccaacaatgtcctgacggacaatggccgcataacagcggtcattgactggagcgaggcgatgttcggggattcccaatacgaggtcgccaacatcttcttctggaggccgtggttggcttgtatggagcagcagacgcgctacttcgagcggaggcatccggagcttgcaggatcgccgcggctccgggcgtatatgctccgcattggtcttgaccaactctatcagagcttggttgacggcaatttcgatgatgcagcttgggcgcagggtcgatgcgacgcaatcgtccgatccggagccgggactgtcgggcgtacacaaatcgcccgcagaagcgcggccgtctggaccgatggctgtgtagaagtactcgccgatagtggaaaccgacgccccagcactcgtccgagggcaaaggaatagcacgtgctacgagatttcgattccaccgccgccttctatgaaaggttgggcttcggaatcgttttccgggacgccggctggatgatcctccagcgcggggatctcatgctggagttcttcgcccaccccaacttgtttattgcagcttataatggttacaaataaagcaatagcatcacaaatttcacaaataaagcatttttttcactgcattctagttgtggtttgtccaaactcatcaatgtatcttatcatgtctgtataccgtcgacctctagctagagcttggcgtaatcatggtcatagctgtttcctgtgtgaaattgttatccgctcacaattccacacaacatacgagccggaagcataaagtgtaaagcctggggtgcctaatgagtgagctaactcacattaattgcgttgcgctcactgcccgctttccagtcgggaaacctgtcgtgccagctgcattaatgaatcggccaacgcgcggggagaggcggtttgcgtattgggcgctcttccgcttcctcgctcactgactcgctgcgctcggtcgttcggctgcggcgagcggtatcagctcactcaaaggcggtaatacggttatccacagaatcaggggataacgcaggaaagaacatgtgagcaaaaggccagcaaaaggccaggaaccgtaaaaaggccgcgttgctggcgtttttccataggctccgcccccctgacgagcatcacaaaaatcgacgctcaagtcagaggtggcgaaacccgacaggactataaagataccaggcgtttccccctggaagctccctcgtgcgctctcctgttccgaccctgccgcttaccggatacctgtccgcctttctcccttcgggaagcgtggcgctttctcatagctcacgctgtaggtatctcagttcggtgtaggtcgttcgctccaagctgggctgtgtgcacgaaccccccgttcagcccgaccgctgcgccttatccggtaactatcgtcttgagtccaacccggtaagacacgacttatcgccactggcagcagccactggtaacaggattagcagagcgaggtatgtaggcggtgctacagagttcttgaagtggtggcctaactacggctacactagaagaacagtatttggtatctgcgctctgctgaagccagttaccttcggaaaaagagttggtagctcttgatccggcaaacaaaccaccgctggtagcggtttttttgtttgcaagcagcagattacgcgcagaaaaaaaggatctcaagaagatcctttgatcttttctacggggtctgacgctcagtggaacgaaaactcacgttaagggattttggtcatgagattatcaaaaaggatcttcacctagatccttttaaattaaaaatgaagttttaaatcaatctaaagtatatatgagtaaacttggtctgacagttaccaatgcttaatcagtgaggcacctatctcagcgatctgtctatttcgttcatccatagttgcctgactccccgtcgtgtagataactacgatacgggagggcttaccatctggccccagtgctgcaatgataccgcgagacccacgctcaccggctccagatttatcagcaataaaccagccagccggaagggccgagcgcagaagtggtcctgcaactttatccgcctccatccagtctattaattgttgccgggaagctagagtaagtagttcgccagttaatagtttgcgcaacgttgttgccattgctacaggcatcgtggtgtcacgctcgtcgtttggtatggcttcattcagctccggttcccaacgatcaaggcgagttacatgatcccccatgttgtgcaaaaaagcggttagctccttcggtcctccgatcgttgtcagaagtaagttggccgcagtgttatcactcatggttatggcagcactgcataattctcttactgtcatgccatccgtaagatgcttttctgtgactggtgagtactcaaccaagtcattctgagaatagtgtatgcggcgaccgagttgctcttgcccggcgtcaatacgggataataccgcgccacatagcagaactttaaaagtgctcatcattggaaaacgttcttcggggcgaaaactctcaaggatcttaccgctgttgagatccagttcgatgtaacccactcgtgcacccaactgatcttcagcatcttttactttcaccagcgtttctgggtgagcaaaaacaggaaggcaaaatgccgcaaaaaagggaataagggcgacacggaaatgttgaatactcatactcttcctttttcaatattattgaagcatttatcagggttattgtctcatgagcggatacatatttgaatgtatttagaaaaataaacaaataggggttccgcgcacatttccccgaaaagtgccacctgacgtc

SEQ ID NO: 112 - DNA, 54 bp, Artificial sequence
  Oligonucleotide 5K-I
acctgtctcgagttttccatggctgacatccagatgacccagtctccatcctcc

SEQ ID NO: 113 - DNA, 42 bp, Artificial sequence
  Oligonucleotide sy3K-C
gggaccaaggtggagatcaaacggaccgtggccgcccccagc

SEQ ID NO: 114 - DNA, 46 bp, Artificial sequence
  Oligonucleotide 5H-B
acctgtcttgaattctccatggccgaggtgcagctggtggagtctg

SEQ ID NO: 115 - DNA, 47 bp, Artificial sequence
  Oligonucleotide sy3H-A
gcccttggtgctagcgctggagacggtcaccagggtgccctggcccc

SEQ ID NO: 116 - DNA, 1338 bp, Artificial sequence
  CDS (1)..(1338): IgG heavy chain sequence 03-001
gaggtgcagctggtggagtctgggggaggcttggtaaagcctggggggtccctgagactctcctgtgcagcctctggattcaccttcagcggctactcgatgaactgggtccgccaggcgcccgggaaggggctggagtgggtctcatccattagtggtggtagcacatactacgcagactccaggaagggcagattcaccatctccagagacaattccaagaacacgctgtatcttcagatgaacaacctgagagctgaggacacggctgtgtattactgtgcaagacaccggttccggcacgtcttcgattactggggccagggcaccctggtgaccgtctccagcgctagcaccaagggccccagcgtgttccccctggcccccagcagcaagagcaccagcggcggcacagccgccctgggctgcctggtgaaggactacttccccgagcccgtgaccgtgagctggaacagcggcgccttgaccagcggcgtgcacaccttccccgccgtgctgcagagcagcggcctgtacagcctgagcagcgtggtgaccgtgcccagcagcagcctgggcacccagacctacatctgcaacgtgaaccacaagcccagcaacaccaaggtggacaaacgcgtggagcccaagagctgcgacaagacccacacctgccccccctgccctgcccccgagctgctgggcggaccctccgtgttcctgttcccccccaagcccaaggacaccctcatgatcagccggacccccgaggtgacctgcgtggtggtggacgtgagccacgaggaccccgaggtgaagttcaactggtacgtggacggcgtggaggtgcacaacgccaagaccaagccccgggaggagcagtacaacagcacctaccgggtggtgagcgtgctcaccgtgctgcaccaggactggctgaacggcaaggagtacaagtgcaaggtgagcaacaaggccctgcctgcccccatcgagaagaccatcagcaaggccaagggccagccccgggagccccaggtgtacaccctgccccccagccgggaggagatgaccaagaaccaggtgtccctcacctgtctggtgaagggcttctaccccagcgacatcgccgtggagtgggagagcaacggccagcccgagaacaactacaagaccaccccccctgtgctggacagcgacggcagcttcttcctgtacagcaagctcaccgtggacaagagccggtggcagcagggcaacgtgttcagctgcagcgtgatgcacgaggccctgcacaaccactacacccagaagagcctgagcctgagccccggcaag

SEQ ID NO: 117 - protein, 446 aa, Artificial sequence
  IgG heavy chain sequence 03-001
EVQLVESGGGLVKPGGSLRLSCAASGFTFSGYSMNWVRQAPGKGLEWVSSISGGSTYYADSRKGRFTISRDNSKNTLYLQMNNLRAEDTAVYYCARHRFRHVFDYWGQGTLVTVSSASTKGPSVFPLAPSSKSTSGGTAALGCLVKDYFPEPVTVSWNSGALTSGVHTFPAVLQSSGLYSLSSVVTVPSSSLGTQTYICNVNHKPSNTKVDKRVEPKSCDKTHTCPPCPAPELLGGPSVFLFPPKPKDTLMISRTPEVTCVVVDVSHEDPEVKFNWYVDGVEVHNAKTKPREEQYNSTYRVVSVLTVLHQDWLNGKEYKCKVSNKALPAPIEKTISKAKGQPREPQVYTLPPSREEMTKNQVSLTCLVKGFYPSDIAVEWESNGQPENNYKTTPPVLDSDGSFFLYSKLTVDKSRWQQGNVFSCSVMHEALHNHYTQKSLSLSPGK

SEQ ID NO: 118 - DNA, 1356 bp, Artificial sequence
  CDS (1)..(1356): IgG heavy chain sequence of 03-002
gaggtgcagctggtggagtctgggggaggcctggtcaagcctggggggtccctgagactctcctgtgcagcctctggattcaccttcagcggctacagcatgagctgggtccgccaggcgcccgggaaggggctggagtgggttggccgtactagaaacaaagctaacagttacaccacagaatacgccgcgtctgtgaaaggcagattcaccatctcaagagatgattcaaagaactcactgtatctgcaaatgaacagcctgaaaaccgaggacacggccgtgtattactgtgctagatactactcccgctccctcaaggccttcgattactggggccagggcaccctggtgaccgtctccagcgctagcaccaagggccccagcgtgttccccctggcccccagcagcaagagcaccagcggcggcacagccgccctgggctgcctggtgaaggactacttccccgagcccgtgaccgtgagctggaacagcggcgccttgaccagcggcgtgcacaccttccccgccgtgctgcagagcagcggcctgtacagcctgagcagcgtggtgaccgtgcccagcagcagcctgggcacccagacctacatctgcaacgtgaaccacaagcccagcaacaccaaggtggacaaacgcgtggagcccaagagctgcgacaagacccacacctgccccccctgccctgcccccgagctgctgggcggaccctccgtgttcctgttcccccccaagcccaaggacaccctcatgatcagccggacccccgaggtgacctgcgtggtggtggacgtgagccacgaggaccccgaggtgaagttcaactggtacgtggacggcgtggaggtgcacaacgccaagaccaagccccgggaggagcagtacaacagcacctaccgggtggtgagcgtgctcaccgtgctgcaccaggactggctgaacggcaaggagtacaagtgcaaggtgagcaacaaggccctgcctgcccccatcgagaagaccatcagcaaggccaagggccagccccgggagccccaggtgtacaccctgccccccagccgggaggagatgaccaagaaccaggtgtccctcacctgtctggtgaagggcttctaccccagcgacatcgccgtggagtgggagagcaacggccagcccgagaacaactacaagaccaccccccctgtgctggacagcgacggcagcttcttcctgtacagcaagctcaccgtggacaagagccggtggcagcagggcaacgtgttcagctgcagcgtgatgcacgaggccctgcacaaccactacacccagaagagcctgagcctgagccccggcaag

SEQ ID NO: 119 - protein, 452 aa, Artificial sequence
  IgG heavy chain sequence of 03-002
EVQLVESGGGLVKPGGSLRLSCAASGFTFSGYSMSWVRQAPGKGLEWVGRTRNKANSYTTEYAASVKGRFTISRDDSKNSLYLQMNSLKTEDTAVYYCARYYSRSLKAFDYWGQGTLVTVSSASTKGPSVFPLAPSSKSTSGGTAALGCLVKDYFPEPVTVSWNSGALTSGVHTFPAVLQSSGLYSLSSVVTVPSSSLGTQTYICNVNHKPSNTKVDKRVEPKSCDKTHTCPPCPAPELLGGPSVFLFPPKPKDTLMISRTPEVTCVVVDVSHEDPEVKFNWYVDGVEVHNAKTKPREEQYNSTYRVVSVLTVLHQDWLNGKEYKCKVSNKALPAPIEKTISKAKGQPREPQVYTLPPSREEMTKNQVSLTCLVKGFYPSDIAVEWESNGQPENNYKTTPPVLDSDGSFFLYSKLTVDKSRWQQGNVFSCSVMHEALHNHYTQKSLSLSPGK

SEQ ID NO: 120 - DNA, 1353 bp, Artificial sequence
  CDS (1)..(1353): IgG heavy chain sequence 03-009
gaggtgcagctggtggagtctgggggaggcgtggtccagcctgggaggtccctgagactctcctgtgcagcctctggattcacctttagcgactaccccatgaactgggtccgccaggcgcccgggaaggggctggagtgggtctcatccattagtggtagtggtggtagcacatactacgcagactccgtgaagggccggttcaccatctccagagacaattccaagaacacgctgtatctgcaaatgaacagcctgagagccgaggacacagccgtgtattactgtgcaaaaggcctcttcatggtcaccacgtacgcgttcgattactggggccagggcaccctggtgaccgtctccagcgctagcaccaagggccccagcgtgttccccctggcccccagcagcaagagcaccagcggcggcacagccgccctgggctgcctggtgaaggactacttccccgagcccgtgaccgtgagctggaacagcggcgccttgaccagcggcgtgcacaccttccccgccgtgctgcagagcagcggcctgtacagcctgagcagcgtggtgaccgtgcccagcagcagcctgggcacccagacctacatctgcaacgtgaaccacaagcccagcaacaccaaggtggacaaacgcgtggagcccaagagctgcgacaagacccacacctgccccccctgccctgcccccgagctgctgggcggaccctccgtgttcctgttcccccccaagcccaaggacaccctcatgatcagccggacccccgaggtgacctgcgtggtggtggacgtgagccacgaggaccccgaggtgaagttcaactggtacgtggacggcgtggaggtgcacaacgccaagaccaagccccgggaggagcagtacaacagcacctaccgggtggtgagcgtgctcaccgtgctgcaccaggactggctgaacggcaaggagtacaagtgcaaggtgagcaacaaggccctgcctgcccccatcgagaagaccatcagcaaggccaagggccagccccgggagccccaggtgtacaccctgccccccagccgggaggagatgaccaagaaccaggtgtccctcacctgtctggtgaagggcttctaccccagcgacatcgccgtggagtgggagagcaacggccagcccgagaacaactacaagaccaccccccctgtgctggacagcgacggcagcttcttcctgtacagcaagctcaccgtggacaagagccggtggcagcagggcaacgtgttcagctgcagcgtgatgcacgaggccctgcacaaccactacacccagaagagcctgagcctgagccccggcaag

SEQ ID NO: 121 - protein, 451 aa, Artificial sequence
  IgG heavy chain sequence 03-009
EVQLVESGGGVVQPGRSLRLSCAASGFTFSDYPMNWVRQAPGKGLEWVSSISGSGGSTYYADSVKGRFTISRDNSKNTLYLQMNSLRAEDTAVYYCAKGLFMVTTYAFDYWGQGTLVTVSSASTKGPSVFPLAPSSKSTSGGTAALGCLVKDYFPEPVTVSWNSGALTSGVHTFPAVLQSSGLYSLSSVVTVPSSSLGTQTYICNVNHKPSNTKVDKRVEPKSCDKTHTCPPCPAPELLGGPSVFLFPPKPKDTLMISRTPEVTCVVVDVSHEDPEVKFNWYVDGVEVHNAKTKPREEQYNSTYRVVSVLTVLHQDWLNGKEYKCKVSNKALPAPIEKTISKAKGQPREPQVYTLPPSREEMTKNQVSLTCLVKGFYPSDIAVEWESNGQPENNYKTTPPVLDSDGSFFLYSKLTVDKSRWQQGNVFSCSVMHEALHNHYTQKSLSLSPGK

SEQ ID NO: 122 - DNA, 1350 bp, Artificial sequence
  CDS (1)..(1350): IgG heavy chain of 03-013
gaggtgcagctggtggagtctgggggaggcttggtccagcctggagggtccctgagactctcctgtgcagcctctggattcaccttcagtgaccactacatggactgggtccgccaggctccagggaaggggctggagtgggttggccgtactagaaacaaagctaacagttacaccacagaatacgccgcgtctgtgaaaggcagattcaccatctcaagagatgattcaaagaactcactgtatctgcaaatgaacagcctgaaaaccgaggacacggccgtgtattactgtgcaaaggggttgactcctttgtactttgactactggggccagggcaccctggtgaccgtctccagcgctagcaccaagggccccagcgtgttccccctggcccccagcagcaagagcaccagcggcggcacagccgccctgggctgcctggtgaaggactacttccccgagcccgtgaccgtgagctggaacagcggcgccttgaccagcggcgtgcacaccttccccgccgtgctgcagagcagcggcctgtacagcctgagcagcgtggtgaccgtgcccagcagcagcctgggcacccagacctacatctgcaacgtgaaccacaagcccagcaacaccaaggtggacaaacgcgtggagcccaagagctgcgacaagacccacacctgccccccctgccctgcccccgagctgctgggcggaccctccgtgttcctgttcccccccaagcccaaggacaccctcatgatcagccggacccccgaggtgacctgcgtggtggtggacgtgagccacgaggaccccgaggtgaagttcaactggtacgtggacggcgtggaggtgcacaacgccaagaccaagccccgggaggagcagtacaacagcacctaccgggtggtgagcgtgctcaccgtgctgcaccaggactggctgaacggcaaggagtacaagtgcaaggtgagcaacaaggccctgcctgcccccatcgagaagaccatcagcaaggccaagggccagccccgggagccccaggtgtacaccctgccccccagccgggaggagatgaccaagaaccaggtgtccctcacctgtctggtgaagggcttctaccccagcgacatcgccgtggagtgggagagcaacggccagcccgagaacaactacaagaccaccccccctgtgctggacagcgacggcagcttcttcctgtacagcaagctcaccgtggacaagagccggtggcagcagggcaacgtgttcagctgcagcgtgatgcacgaggccctgcacaaccactacacccagaagagcctgagcctgagccccggcaag

SEQ ID NO: 123 - protein, 450 aa, Artificial sequence
  IgG heavy chain of 03-013
EVQLVESGGGLVQPGGSLRLSCAASGFTFSDHYMDWVRQAPGKGLEWVGRTRNKANSYTTEYAASVKGRFTISRDDSKNSLYLQMNSLKTEDTAVYYCAKGLTPLYFDYWGQGTLVTVSSASTKGPSVFPLAPSSKSTSGGTAALGCLVKDYFPEPVTVSWNSGALTSGVHTFPAVLQSSGLYSLSSVVTVPSSSLGTQTYICNVNHKPSNTKVDKRVEPKSCDKTHTCPPCPAPELLGGPSVFLFPPKPKDTLMISRTPEVTCVVVDVSHEDPEVKFNWYVDGVEVHNAKTKPREEQYNSTYRVVSVLTVLHQDWLNGKEYKCKVSNKALPAPIEKTISKAKGQPREPQVYTLPPSREEMTKNQVSLTCLVKGFYPSDIAVEWESNGQPENNYKTTPPVLDSDGSFFLYSKLTVDKSRWQQGNVFSCSVMHEALHNHYTQKSLSLSPGK

SEQ ID NO: 124 - DNA, 1350 bp, Artificial sequence
  CDS (1)..(1350): IgG heavy chain of 03-014
gaggtgcagctggtggagtctgggggaggcttggtccagcctggagggtccctgagactctcctgtgcagcctctggattcaccttcagtgaccactacatggactgggtccgccaggctccagggaaggggctggagtgggttggccgtactagaaacaaagctaacagttacaccacagaatacgccgcgtctgtgaaaggcagattcaccatctcaagagatgattcaaagaactcactgtatctgcaaatgaacagcctgaaaaccgaggacacggccgtgtattactgtgcaagggggatttcgccgttttactttgactactggggccagggcaccctggtgaccgtctccagcgctagcaccaagggccccagcgtgttccccctggcccccagcagcaagagcaccagcggcggcacagccgccctgggctgcctggtgaaggactacttccccgagcccgtgaccgtgagctggaacagcggcgccttgaccagcggcgtgcacaccttccccgccgtgctgcagagcagcggcctgtacagcctgagcagcgtggtgaccgtgcccagcagcagcctgggcacccagacctacatctgcaacgtgaaccacaagcccagcaacaccaaggtggacaaacgcgtggagcccaagagctgcgacaagacccacacctgccccccctgccctgcccccgagctgctgggcggaccctccgtgttcctgttcccccccaagcccaaggacaccctcatgatcagccggacccccgaggtgacctgcgtggtggtggacgtgagccacgaggaccccgaggtgaagttcaactggtacgtggacggcgtggaggtgcacaacgccaagaccaagccccgggaggagcagtacaacagcacctaccgggtggtgagcgtgctcaccgtgctgcaccaggactggctgaacggcaaggagtacaagtgcaaggtgagcaacaaggccctgcctgcccccatcgagaagaccatcagcaaggccaagggccagccccgggagccccaggtgtacaccctgccccccagccgggaggagatgaccaagaaccaggtgtccctcacctgtctggtgaagggcttctaccccagcgacatcgccgtggagtgggagagcaacggccagcccgagaacaactacaagaccaccccccctgtgctggacagcgacggcagcttcttcctgtacagcaagctcaccgtggacaagagccggtggcagcagggcaacgtgttcagctgcagcgtgatgcacgaggccctgcacaaccactacacccagaagagcctgagcctgagccccggcaag

SEQ ID NO: 125 - protein, 450 aa, Artificial sequence
  IgG heavy chain of 03-014
EVQLVESGGGLVQPGGSLRLSCAASGFTFSDHYMDWVRQAPGKGLEWVGRTRNKANSYTTEYAASVKGRFTISRDDSKNSLYLQMNSLKTEDTAVYYCARGISPFYFDYWGQGTLVTVSSASTKGPSVFPLAPSSKSTSGGTAALGCLVKDYFPEPVTVSWNSGALTSGVHTFPAVLQSSGLYSLSSVVTVPSSSLGTQTYICNVNHKPSNTKVDKRVEPKSCDKTHTCPPCPAPELLGGPSVFLFPPKPKDTLMISRTPEVTCVVVDVSHEDPEVKFNWYVDGVEVHNAKTKPREEQYNSTYRVVSVLTVLHQDWLNGKEYKCKVSNKALPAPIEKTISKAKGQPREPQVYTLPPSREEMTKNQVSLTCLVKGFYPSDIAVEWESNGQPENNYKTTPPVLDSDGSFFLYSKLTVDKSRWQQGNVFSCSVMHEALHNHYTQKSLSLSPGK

SEQ ID NO: 126 - DNA, 1344 bp, Artificial sequence
  CDS (1)..(1344): IgG heavy chain of 03-018
gaggtgcagctggtggagtctgggggaggcttggtacagcctggggggtccctgagactctcctgtgcagcctctggattcacctttagcagctatgccatgagctgggtccgccaggctccagggaaggggctggagtgggtctcagctattagtggtagtggtggtagcacatactacgcagactccgtgaagggccggttcaccatctccagagacaattccaagaacacgctgtatctgcaaatgaacagcctgagagccgaggacacggccgtgtattactgtgcaaagtttaatccgtttacttcctttgactactggggccagggcaccctggtgaccgtctccagcgctagcaccaagggccccagcgtgttccccctggcccccagcagcaagagcaccagcggcggcacagccgccctgggctgcctggtgaaggactacttccccgagcccgtgaccgtgagctggaacagcggcgccttgaccagcggcgtgcacaccttccccgccgtgctgcagagcagcggcctgtacagcctgagcagcgtggtgaccgtgcccagcagcagcctgggcacccagacctacatctgcaacgtgaaccacaagcccagcaacaccaaggtggacaaacgcgtggagcccaagagctgcgacaagacccacacctgccccccctgccctgcccccgagctgctgggcggaccctccgtgttcctgttcccccccaagcccaaggacaccctcatgatcagccggacccccgaggtgacctgcgtggtggtggacgtgagccacgaggaccccgaggtgaagttcaactggtacgtggacggcgtggaggtgcacaacgccaagaccaagccccgggaggagcagtacaacagcacctaccgggtggtgagcgtgctcaccgtgctgcaccaggactggctgaacggcaaggagtacaagtgcaaggtgagcaacaaggccctgcctgcccccatcgagaagaccatcagcaaggccaagggccagccccgggagccccaggtgtacaccctgccccccagccgggaggagatgaccaagaaccaggtgtccctcacctgtctggtgaagggcttctaccccagcgacatcgccgtggagtgggagagcaacggccagcccgagaacaactacaagaccaccccccctgtgctggacagcgacggcagcttcttcctgtacagcaagctcaccgtggacaagagccggtggcagcagggcaacgtgttcagctgcagcgtgatgcacgaggccctgcacaaccactacacccagaagagcctgagcctgagccccggcaag

SEQ ID NO: 127 - protein, 448 aa, Artificial sequence
  IgG heavy chain of 03-018
EVQLVESGGGLVQPGGSLRLSCAASGFTFSSYAMSWVRQAPGKGLEWVSAISGSGGSTYYADSVKGRFTISRDNSKNTLYLQMNSLRAEDTAVYYCAKFNPFTSFDYWGQGTLVTVSSASTKGPSVFPLAPSSKSTSGGTAALGCLVKDYFPEPVTVSWNSGALTSGVHTFPAVLQSSGLYSLSSVVTVPSSSLGTQTYICNVNHKPSNTKVDKRVEPKSCDKTHTCPPCPAPELLGGPSVFLFPPKPKDTLMISRTPEVTCVVVDVSHEDPEVKFNWYVDGVEVHNAKTKPREEQYNSTYRVVSVLTVLHQDWLNGKEYKCKVSNKALPAPIEKTISKAKGQPREPQVYTLPPSREEMTKNQVSLTCLVKGFYPSDIAVEWESNGQPENNYKTTPPVLDSDGSFFLYSKLTVDKSRWQQGNVFSCSVMHEALHNHYTQKSLSLSPGK

SEQ ID NO: 128 - DNA, 642 bp, Artificial sequence
  CDS (1)..(642): IgG light chain of 03-001, 03-002, 03-009, 03-013, 03-014 and 03- 018
gacattcagatgacccagtctccatcctccctgtctgcatctgtaggagacagagtcaccatcacttgccgggcaagtcagagcattagcagctacttaaattggtatcagcagaaaccagggaaagcccctaagctcctgatctatgctgcatccagtttgcaaagtggggtcccatcaaggttcagtggcagtggatctgggacagatttcactctcaccatcagcagtctgcaacctgaagattttgcaacttactactgtcaacagagttacagtacccctccaacgttcggccaagggaccaaggtggagatcaaacggaccgtggccgctcccagcgtgttcatcttccccccctccgacgagcagctgaagagcggcaccgccagcgtggtgtgcctgctgaacaacttctacccccgggaggccaaggtgcagtggaaggtggacaacgccctgcagagcggcaacagccaggagagcgtgaccgagcaggacagcaaggactccacctacagcctgagcagcaccctcaccctgagcaaggccgactacgagaagcacaaggtgtacgcctgcgaggtgacccaccagggcctgagcagccccgtgaccaagagcttcaaccggggcgagtgt

SEQ ID NO: 129 - protein, 214 aa, Artificial sequence
  IgG light chain of 03-001, 03-002, 03-009, 03-013, 03-014 and 03- 018
DIQMTQSPSSLSASVGDRVTITCRASQSISSYLNWYQQKPGKAPKLLIYAASSLQSGVPSRFSGSGSGTDFTLTISSLQPEDFATYYCQQSYSTPPTFGQGTKVEIKRTVAAPSVFIFPPSDEQLKSGTASVVCLLNNFYPREAKVQWKVDNALQSGNSQESVTEQDSKDSTYSLSSTLTLSKADYEKHKVYACEVTHQGLSSPVTKSFNRGEC

SEQ ID NO: 130 - DNA, 4914 bp, Artificial sequence
  Vector pDV-C05
aagcttgcatgcaaattctatttcaaggagacagtcataatgaaatacctattgcctacggcagccgctggattgttattactcgcggcccagccggccatggccgaggtgtttgactaatggggcgcgcctcagggaaccctggtcaccgtctcgagcggtacgggcggttcaggcggaaccggcagcggcactggcgggtcgacggaaattgtgctcacacagtctccagccaccctgtctttgtctccaggggaaagagccaccctctcctgcagggccagtcagagtgttagcagctacttagcctggtaccaacagaaacctggccaggctcccaggctcctcatctatgatgcatccaacagggccactggcatcccagccaggttcagtggcagtgggtctgggacagacttcactctcaccatcagcagcctagagcctgaagattttgcagtttattactgtcagcagcgtagcaactggcctccggctttcggcggagggaccaaggtggagatcaaacgtgcggccgcatataccgatattgaaatgaaccgcctgggcaaaggggccgcatagactgttgaaagttgtttagcaaaacctcatacagaaaattcatttactaacgtctggaaagacgacaaaactttagatcgttacgctaactatgagggctgtctgtggaatgctacaggcgttgtggtttgtactggtgacgaaactcagtgttacggtacatgggttcctattgggcttgctatccctgaaaatgagggtggtggctctgagggtggcggttctgagggtggcggttctgagggtggcggtactaaacctcctgagtacggtgatacacctattccgggctatacttatatcaaccctctcgacggcacttatccgcctggtactgagcaaaaccccgctaatcctaatccttctcttgaggagtctcagcctcttaatactttcatgtttcagaataataggttccgaaataggcagggtgcattaactgtttatacgggcactgttactcaaggcactgaccccgttaaaacttattaccagtacactcctgtatcatcaaaagccatgtatgacgcttactggaacggtaaattcagagactgcgctttccattctggctttaatgaggatccattcgtttgtgaatatcaaggccaatcgtctgacctgcctcaacctcctgtcaatgctggcggcggctctggtggtggttctggtggcggctctgagggtggcggctctgagggtggcggttctgagggtggcggctctgagggtggcggttccggtggcggctccggttccggtgattttgattatgaaaaaatggcaaacgctaataagggggctatgaccgaaaatgccgatgaaaacgcgctacagtctgacgctaaaggcaaacttgattctgtcgctactgattacggtgctgctatcgatggtttcattggtgacgtttccggccttgctaatggtaatggtgctactggtgattttgctggctctaattcccaaatggctcaagtcggtgacggtgataattcacctttaatgaataatttccgtcaatatttaccttctttgcctcagtcggttgaatgtcgcccttatgtctttggcgctggtaaaccatatgaattttctattgattgtgacaaaataaacttattccgtggtgtctttgcgtttcttttatatgttgccacctttatgtatgtattttcgacgtttgctaacatactgcgtaataaggagtcttaataagaattcactggccgtcgttttacaacgtcgtgactgggaaaaccctggcgttacccaacttaatcgccttgcagcacatccccctttcgccagctggcgtaatagcgaagaggcccgcaccgatcgcccttcccaacagttgcgcagcctgaatggcgaatggcgcctgatgcggtattttctccttacgcatctgtgcggtatttcacaccgcatacgtcaaagcaaccatagtacgcgccctgtagcggcgcattaagcgcggcgggtgtggtggttacgcgcagcgtgaccgctacacttgccagcgccctagcgcccgctcctttcgctttcttcccttcctttctcgccacgttcgccggctttccccgtcaagctctaaatcgggggctccctttagggttccgatttagtgctttacggcacctcgaccccaaaaaacttgatttgggtgatggttcacgtagtgggccatcgccctgatagacggtttttcgccctttgacgttggagtccacgttctttaatagtggactcttgttccaaactggaacaacactcaaccctatctcgggctattcttttgatttataagggattttgccgatttcggcctattggttaaaaaatgagctgatttaacaaaaatttaacgcgaattttaacaaaatattaacgtttacaattttatggtgcactctcagtacaatctgctctgatgccgcatagttaagccagccccgacacccgccaacacccgctgacgcgccctgacgggcttgtctgctcccggcatccgcttacagacaagctgtgaccgtctccgggagctgcatgtgtcagaggttttcaccgtcatcaccgaaacgcgcgagacgaaagggcctcgtgatacgcctatttttataggttaatgtcatgataataatggtttcttagacgtcaggtggcacttttcggggaaatgtgcgcggaacccctatttgtttatttttctaaatacattcaaatatgtatccgctcatgagacaataaccctgataaatgcttcaataatattgaaaaaggaagagtatgagtattcaacatttccgtgtcgcccttattcccttttttgcggcattttgccttcctgtttttgctcacccagaaacgctggtgaaagtaaaagatgctgaagatcagttgggtgcacgagtgggttacatcgaactggatctcaacagcggtaagatccttgagagttttcgccccgaagaacgttttccaatgatgagcacttttaaagttctgctatgtggcgcggtattatcccgtattgacgccgggcaagagcaactcggtcgccgcatacactattctcagaatgacttggttgagtactcaccagtcacagaaaagcatcttacggatggcatgacagtaagagaattatgcagtgctgccataaccatgagtgataacactgcggccaacttacttctgacaacgatcggaggaccgaaggagctaaccgcttttttgcacaacatgggggatcatgtaactcgccttgatcgttgggaaccggagctgaatgaagccataccaaacgacgagcgtgacaccacgatgcctgtagcaatggcaacaacgttgcgcaaactattaactggcgaactacttactctagcttcccggcaacaattaatagactggatggaggcggataaagttgcaggaccacttctgcgctcggcccttccggctggctggtttattgctgataaatctggagccggtgagcgtgggtctcgcggtatcattgcagcactggggccagatggtaagccctcccgtatcgtagttatctacacgacggggagtcaggcaactatggatgaacgaaatagacagatcgctgagataggtgcctcactgattaagcattggtaactgtcagaccaagtttactcatatatactttagattgatttaaaacttcatttttaatttaaaaggatctaggtgaagatcctttttgataatctcatgaccaaaatcccttaacgtgagttttcgttccactgagcgtcagaccccgtagaaaagatcaaaggatcttcttgagatcctttttttctgcgcgtaatctgctgcttgcaaacaaaaaaaccaccgctaccagcggtggtttgtttgccggatcaagagctaccaactctttttccgaaggtaactggcttcagcagagcgcagataccaaatactgtccttctagtgtagccgtagttaggccaccacttcaagaactctgtagcaccgcctacatacctcgctctgctaatcctgttaccagtggctgctgccagtggcgataagtcgtgtcttaccgggttggactcaagacgatagttaccggataaggcgcagcggtcgggctgaacggggggttcgtgcacacagcccagcttggagcgaacgacctacaccgaactgagatacctacagcgtgagctatgagaaagcgccacgcttcccgaagggagaaaggcggacaggtatccggtaagcggcagggtcggaacaggagagcgcacgagggagcttccagggggaaacgcctggtatctttatagtcctgtcgggtttcgccacctctgacttgagcgtcgatttttgtgatgctcgtcaggggggcggagcctatggaaaaacgccagcaacgcggcctttttacggttcctggccttttgctggccttttgctcacatgttctttcctgcgttatcccctgattctgtggataaccgtattaccgcctttgagtgagctgataccgctcgccgcagccgaacgaccgagcgcagcgagtcagtgagcgaggaagcggaagagcgcccaatacgcaaaccgcctctccccgcgcgttggccgattcattaatgcagctggcacgacaggtttcccgactggaaagcgggcagtgagcgcaacgcaattaatgtgagttagctcactcattaggcaccccaggctttacactttatgcttccggctcgtatgttgtgtggaattgtgagcggataacaatttcacacaggaaacagctatgaccatgattacgcc

SEQ ID NO: 131 - DNA, 24 bp, Artificial sequence
  primer HuCIgG
gtccaccttggtgttgctgggctt

SEQ ID NO: 132 - DNA, 23 bp, Artificial sequence
  primer HuVH1B/7A
cagrtgcagctggtgcartctgg

SEQ ID NO: 133 - DNA, 23 bp, Artificial sequence
  primer HuVH1C
saggtccagctggtrcagtctgg

SEQ ID NO: 134 - DNA, 23 bp, Artificial sequence
  primer HuVH2B
saggtgcagctggtggagtctgg

SEQ ID NO: 135 - DNA, 23 bp, Artificial sequence
  primer HuVH3B
saggtgcagctggtggagtctgg

SEQ ID NO: 136 - DNA, 23 bp, Artificial sequence
  primer HuVH3C
gaggtgcagctggtggagwcygg

SEQ ID NO: 137 - DNA, 23 bp, Artificial sequence
  primer HuVH4B
caggtgcagctacagcagtgggg

SEQ ID NO: 138 - DNA, 23 bp, Artificial sequence
  primer HuVH4C
cagstgcagctgcaggagtcsgg

SEQ ID NO: 139 - DNA, 23 bp, Artificial sequence
  primer HuVH5B
gargtgcagctggtgcagtctgg

SEQ ID NO: 140 - DNA, 23 bp, Artificial sequence
  primer HuVH6A
caggtacagctgcagcagtcagg

SEQ ID NO: 141 - DNA, 24 bp, Artificial sequence
  primer HuJH1/2
tgaggagacggtgaccagggtgcc

SEQ ID NO: 142 - DNA, 24 bp, Artificial sequence
  primer HuJH3
tgaagagacggtgaccattgtccc

SEQ ID NO: 143 - DNA, 24 bp, Artificial sequence
  primer HuJH4/5
tgaggagacggtgaccagggttcc

SEQ ID NO: 144 - DNA, 24 bp, Artificial sequence
  primer HuJH6
tgaggagacggtgaccgtggtccc

SEQ ID NO: 145 - DNA, 56 bp, Artificial sequence
  primer HuVH1B/7A-NcoI
gtcctcgcaactgcggcccagccggccatggcccagrtgcagctggtgcartctgg

SEQ ID NO: 146 - DNA, 56 bp, Artificial sequence
  primer HuVH1C-NcoI
gtcctcgcaactgcggcccagccggccatggccsaggtccagctggtrcagtctgg

SEQ ID NO: 147 - DNA, 56 bp, Artificial sequence
  primer HuVH2B-NcoI
gtcctcgcaactgcggcccagccggccatggcccagrtcaccttgaaggagtctgg

SEQ ID NO: 148 - DNA, 56 bp, Artificial sequence
  primer HuVH3B-NcoI
gtcctcgcaactgcggcccagccggccatggccsaggtgcagctggtggagtctgg

SEQ ID NO: 149 - DNA, 56 bp, Artificial sequence
  primer HuVH3C-NcoI
gtcctcgcaactgcggcccagccggccatggccgaggtgcagctggtggagwcygg

SEQ ID NO: 150 - DNA, 56 bp, Artificial sequence
  primer HuVH4B-NcoI
gtcctcgcaactgcggcccagccggccatggcccaggtgcagctacagcagtgggg

SEQ ID NO: 151 - DNA, 56 bp, Artificial sequence
  primer HuVH4C-NcoI
gtcctcgcaactgcggcccagccggccatggcccagstgcagctgcaggagtcsgg

SEQ ID NO: 152 - DNA, 56 bp, Artificial sequence
  primer HuVH5B-NcoI
gtcctcgcaactgcggcccagccggccatggccgargtgcagctggtgcagtctgg

SEQ ID NO: 153 - DNA, 56 bp, Artificial sequence
  primer HuVH6A-NcoI
gtcctcgcaactgcggcccagccggccatggcccaggtacagctgcagcagtcagg

SEQ ID NO: 154 - DNA, 36 bp, Artificial sequence
  primer HuJH1/2-XhoI
gagtcattctcgactcgagacggtgaccagggtgcc

SEQ ID NO: 155 - DNA, 36 bp, Artificial sequence
  primer HuJH3-XhoI
gagtcattctcgactcgagacggtgaccattgtccc

SEQ ID NO: 156 - DNA, 36 bp, Artificial sequence
  primer HuJH4/5-XhoI
gagtcattctcgactcgagacggtgaccagggttcc

SEQ ID NO: 157 - DNA, 36 bp, Artificial sequence
  primer HuJH6- XhoI
gagtcattctcgactcgagacggtgaccgtggtccc

SEQ ID NO: 158 - DNA, 24 bp, Artificial sequence
  primer HuCk
acactctcccctgttgaagctctt

SEQ ID NO: 159 - DNA, 23 bp, Artificial sequence
  primer HuClambda2
tgaacattctgtaggggccactg

SEQ ID NO: 160 - DNA, 23 bp, Artificial sequence
  primer HuClambda7
agagcattctgcaggggccactg

SEQ ID NO: 161 - DNA, 23 bp, Artificial sequence
  primer HuVlambda1A
cagtctgtgctgactcagccacc

SEQ ID NO: 162 - DNA, 23 bp, Artificial sequence
  primer HuVlambda1B
cagtctgtgytgacgcagccgcc

SEQ ID NO: 163 - DNA, 23 bp, Artificial sequence
  primer HuVlambda1C
cagtctgtcgtgacgcagccgcc

SEQ ID NO: 164 - DNA, 21 bp, Artificial sequence
  primer HuVlambda2
cartctgccctgactcagcct

SEQ ID NO: 165 - DNA, 23 bp, Artificial sequence
  primer HuVlambda3A
tcctatgwgctgactcagccacc

SEQ ID NO: 166 - DNA, 23 bp, Artificial sequence
  primer HuVlambda3B
tcttctgagctgactcaggaccc

SEQ ID NO: 167 - DNA, 23 bp, Artificial sequence
  primer HuVlambda4
cacgttatactgactcaaccgcc

SEQ ID NO: 168 - DNA, 23 bp, Artificial sequence
  primer HuVlambda5
caggctgtgctgactcagccgtc

SEQ ID NO: 169 - DNA, 23 bp, Artificial sequence
  primer HuVlambda6
aattttatgctgactcagcccca

SEQ ID NO: 170 - DNA, 23 bp, Artificial sequence
  primer HuVlambda7/8
cagrctgtggtgacycaggagcc

SEQ ID NO: 171 - DNA, 23 bp, Artificial sequence
  primer HuVlambda9
cwgcctgtgctgactcagccmcc

SEQ ID NO: 172 - DNA, 23 bp, Artificial sequence
  primer HuVkappa1B
gacatccagwtgacccagtctcc

SEQ ID NO: 173 - DNA, 23 bp, Artificial sequence
  primer HuVkappa2
gatgttgtgatgactcagtctcc

SEQ ID NO: 174 - DNA, 23 bp, Artificial sequence
  primer HuVkappa3
gaaattgtgwtgacrcagtctcc

SEQ ID NO: 175 - DNA, 23 bp, Artificial sequence
  primer HuVkappa4
gatattgtgatgacccacactcc

SEQ ID NO: 176 - DNA, 23 bp, Artificial sequence
  primer HuVkappa5
gaaacgacactcacgcagtctcc

SEQ ID NO: 177 - DNA, 23 bp, Artificial sequence
  primer HuVkappa6
gaaattgtgctgactcagtctcc

SEQ ID NO: 178 - DNA, 24 bp, Artificial sequence
  primer HuJlambda1
acctaggacggtgaccttggtccc

SEQ ID NO: 179 - DNA, 24 bp, Artificial sequence
  primer HuJlambda2/3
acctaggacggtcagcttggtccc

SEQ ID NO: 180 - DNA, 24 bp, Artificial sequence
  primer HuJlambda4/5
acytaaaacggtgagctgggtccc

SEQ ID NO: 181 - DNA, 24 bp, Artificial sequence
  primer HuJkappa1
acgtttgatttccaccttggtccc

SEQ ID NO: 182 - DNA, 24 bp, Artificial sequence
  primer HuJkappa2
acgtttgatctccagcttggtccc

SEQ ID NO: 183 - DNA, 24 bp, Artificial sequence
  primer HuJkappa3
acgtttgatatccactttggtccc

SEQ ID NO: 184 - DNA, 24 bp, Artificial sequence
  primer HuJkappa4
acgtttgatctccaccttggtccc

SEQ ID NO: 185 - DNA, 24 bp, Artificial sequence
  primer HuJkappa5
acgtttaatctccagtcgtgtccc

SEQ ID NO: 186 - DNA, 41 bp, Artificial sequence
  primer HuVkappa1B-SalI
tgagcacacaggtcgacggacatccagwtgacccagtctcc

SEQ ID NO: 187 - DNA, 41 bp, Artificial sequence
  primer HuVkappa2-SalI
tgagcacacaggtcgacggatgttgtgatgactcagtctcc

SEQ ID NO: 188 - DNA, 41 bp, Artificial sequence
  primer HuVkappa3B-SalI
tgagcacacaggtcgacggaaattgtgwtgacrcagtctcc

SEQ ID NO: 189 - DNA, 41 bp, Artificial sequence
  primer HuVkappa4B-SalI
tgagcacacaggtcgacggatattgtgatgacccacactcc

SEQ ID NO: 190 - DNA, 41 bp, Artificial sequence
  primer HuVkappa5-SalI
tgagcacacaggtcgacggaaacgacactcacgcagtctcc

SEQ ID NO: 191 - DNA, 41 bp, Artificial sequence
  primer HuVkappa6-SalI
tgagcacacaggtcgacggaaattgtgctgactcagtctcc

SEQ ID NO: 192 - DNA, 48 bp, Artificial sequence
  primer HuJkappa1-NotI
gagtcattctcgacttgcggccgcacgtttgatttccaccttggtccc

SEQ ID NO: 193 - DNA, 48 bp, Artificial sequence
  primer HuJkappa2-NotI
gagtcattctcgacttgcggccgcacgtttgatctccagcttggtccc

SEQ ID NO: 194 - DNA, 48 bp, Artificial sequence
  primer HuJkappa3-NotI
gagtcattctcgacttgcggccgcacgtttgatatccactttggtccc

SEQ ID NO: 195 - DNA, 48 bp, Artificial sequence
  primer HuJkappa4-NotI
gagtcattctcgacttgcggccgcacgtttgatctccaccttggtccc

SEQ ID NO: 196 - DNA, 48 bp, Artificial sequence
  primer HuJkappa5-NotI
gagtcattctcgacttgcggccgcacgtttaatctccagtcgtgtccc

SEQ ID NO: 197 - DNA, 41 bp, Artificial sequence
  primer HuVlambda1A-SalI
tgagcacacaggtcgacgcagtctgtgctgactcagccacc

SEQ ID NO: 198 - DNA, 41 bp, Artificial sequence
  primer HuVlambda1B-SalI
tgagcacacaggtcgacgcagtctgtgytgacgcagccgcc

SEQ ID NO: 199 - DNA, 41 bp, Artificial sequence
  primer HuVlambda1C-SalI
tgagcacacaggtcgacgcagtctgtcgtgacgcagccgcc

SEQ ID NO: 200 - DNA, 39 bp, Artificial sequence
  primer HuVlambda2-SalI
tgagcacacaggtcgacgcartctgccctgactcagcct

SEQ ID NO: 201 - DNA, 41 bp, Artificial sequence
  primer HuVlambda3A-SalI
tgagcacacaggtcgacgtcctatgwgctgactcagccacc

SEQ ID NO: 202 - DNA, 41 bp, Artificial sequence
  primer HuVlambda3B-SalI
tgagcacacaggtcgacgtcttctgagctgactcaggaccc

SEQ ID NO: 203 - DNA, 41 bp, Artificial sequence
  primer HuVlambda4-SalI
tgagcacacaggtcgacgcacgttatactgactcaaccgcc

SEQ ID NO: 204 - DNA, 41 bp, Artificial sequence
  primer HuVlambda5-SalI
tgagcacacaggtcgacgcaggctgtgctgactcagccgtc

SEQ ID NO: 205 - DNA, 41 bp, Artificial sequence
  primer HuVlambda6-SalI
tgagcacacaggtcgacgaattttatgctgactcagcccca

SEQ ID NO: 206 - DNA, 41 bp, Artificial sequence
  primer HuVlambda7/8-SalI
tgagcacacaggtcgacgcagrctgtggtgacycaggagcc

SEQ ID NO: 207 - DNA, 41 bp, Artificial sequence
  primer HuVlambda9-SalI
tgagcacacaggtcgacgcwgcctgtgctgactcagccmcc

SEQ ID NO: 208 - DNA, 48 bp, Artificial sequence
  primer HuJlambda1-NotI
gagtcattctcgacttgcggccgcacctaggacggtgaccttggtccc

SEQ ID NO: 209 - DNA, 48 bp, Artificial sequence
  primer HuJlambda2/3-NotI
gagtcattctcgacttgcggccgcacctaggacggtcagcttggtccc

SEQ ID NO: 210 - DNA, 48 bp, Artificial sequence
  primer HuJlambda4/5-NotI
gagtcattctcgacttgcggccgcacytaaaacggtgagctgggtccc

SEQ ID NO: 211 - DNA, 753 bp, Artificial sequence
  CDS (1)..(753): SC03-019
gccatggcccagatgcagctggtgcagtctgggggaggcgtggtccagcctgggaggtccctgagactctcctgtgcagcctctggattcaccttcagtggctatgctatgcactgggtccgccaggctccaggcaaggggctggagtgggtggcagttatatcatatgatggaagcaataaatactacgcagactccgtgaagggccgattcgccatctccagagacaattccaagaacacgctgtatctgcaaatgaacagcctgagagctgaggacacggctgtgtattactgtgcgagattccctggtggtaccagaagccgcggctacatggacgtctggggcaaagggaccacggtcaccgtctcgagcggtacgggcggttcaggcggaaccggcagcggcactggcgggtcgacggaaattgtgctcacacagtctccagccaccctgtctttgtctccaggggaaagagccaccctctcctgcagggccagtcagagtgttagcagctacttagcctggtaccaacagaaacctggccaggctcccaggctcctcatctatgatgcatccaacagggccactggcatcccagccaggttcagtggcagtgggtctgggacagacttcactctcaccatcagcagcctagagcctgaagattttgcagtttattactgtcagcagcgtagcaactggcctccggctttcggcggagggaccaaggtggagatcaaacgtgcggcc

SEQ ID NO: 212 - protein, 251 aa, Artificial sequence
  SC03-019
AMAQMQLVQSGGGVVQPGRSLRLSCAASGFTFSGYAMHWVRQAPGKGLEWVAVISYDGSNKYYADSVKGRFAISRDNSKNTLYLQMNSLRAEDTAVYYCARFPGGTRSRGYMDVWGKGTTVTVSSGTGGSGGTGSGTGGSTEIVLTQSPATLSLSPGERATLSCRASQSVSSYLAWYQQKPGQAPRLLIYDASNRATGIPARFSGSGSGTDFTLTISSLEPEDFAVYYCQQRSNWPPAFGGGTKVEIKRAA

SEQ ID NO: 213 - DNA, 762 bp, Artificial sequence
  CDS (1)..(762): SC03-020
gccatggccgaagtgcagctggtgcagtctgggtcagaggtgaaaaagccgggggagtctctgaagatctcttgtaagggttctggatacggctttatcacctactggatcggctgggtgcgccagatgcccgggaaaggcctggagtggatggggatcatctatcctggtgactctgaaaccagatacagcccgtccttccaaggccaggtcaccatctcagccgacaagtccatcaacaccgcctacctgcagtggagcagcctgaaggcctcggacaccgccatatattactgtgcggggggttcggggatttctacccctatggacgtctggggccaagggaccacggtcaccgtctcgagcggtacgggcggttcaggcggaaccggcagcggcactggcgggtcgacggacatccagatgacccagtctccagactccctggctgtgtctctgggcgagagggccaccatcaactgcaagtccagccagaaaattttacacagctccaacaataagaactacttagcttggtaccagcagaaaccaggacagcctcctaagctgctcatttactgggcatctacccgggaatccggggtccctgaccgattcagtggcagcgggtctgggacagatttcactctcaccatcagcagcctgcaggctgaagatgtggcagtttattactgtcagcaatattatagtactcctccggttttcggcggagggaccaaggtggaaatcaaacgtgcggcc

SEQ ID NO: 214 - protein, 254 aa, Artificial sequence
  SC03-020
AMAEVQLVQSGSEVKKPGESLKISCKGSGYGFITYWIGWVRQMPGKGLEWMGIIYPGDSETRYSPSFQGQVTISADKSINTAYLQWSSLKASDTAIYYCAGGSGISTPMDVWGQGTTVTVSSGTGGSGGTGSGTGGSTDIQMTQSPDSLAVSLGERATINCKSSQKILHSSNNKNYLAWYQQKPGQPPKLLIYWASTRESGVPDRFSGSGSGTDFTLTISSLQAEDVAVYYCQQYYSTPPVFGGGTKVEIKRAA

SEQ ID NO: 215 - DNA, 762 bp, Artificial sequence
  CDS (1)..(762): SC03-021
gccatggcccaggtccagctggtacagtctggaacagaggtgaaaaagccgggggagtctctgaagatctcctgtaagggttctggatacggctttatcacctactggatcggctgggtgcgccagatgcccgggaaaggcctggagtggatggggatcatctatcctggtgactctgaaaccagatacagcccgtccttccaaggccaggtcaccatctcagccgacaagtccatcaacaccgcctacctgcagtggagcagcctgaaggcctcggacaccgccatatattactgtgcggggggttcggggatttctacccctatggacgtctggggccaagggaccacggtcaccgtctcgagcggtacgggcggttcaggcggaaccggcagcggcactggcgggtcgacggatgttgtgatgactcagtctccagactccctggctgtgtctctgggcgagagggccaccatcaactgcaagtccagccagagtgttttacacagctccaacaataagaactacctagcttggtaccagcagaaaccaggacagcctcctaagctgctcatttactgggcatctacccggcaatccggggtccctgaccgattcagtggcagcgggtctgggacagatttcactctcaccatcagcagcctgcaggctgaagatgtggcagtttattactgtcagcaatattatagtactcctccgacgttcggccaagggaccaaggtggaaatcaaacgtgcggcc

SEQ ID NO: 216 - protein, 254 aa, Artificial sequence
  SC03-021
AMAQVQLVQSGTEVKKPGESLKISCKGSGYGFITYWIGWVRQMPGKGLEWMGIIYPGDSETRYSPSFQGQVTISADKSINTAYLQWSSLKASDTAIYYCAGGSGISTPMDVWGQGTTVTVSSGTGGSGGTGSGTGGSTDVVMTQSPDSLAVSLGERATINCKSSQSVLHSSNNKNYLAWYQQKPGQPPKLLIYWASTRQSGVPDRFSGSGSGTDFTLTISSLQAEDVAVYYCQQYYSTPPTFGQGTKVEIKRAA

SEQ ID NO: 217 - DNA, 762 bp, Artificial sequence
  CDS (1)..(762): SC03-022
gccatggcccagatgcagctggtgcaatctggaacagaggtgaaaaagccgggggagtctctgaagatctcctgtaagggttctggatacggctttatcacctactggatcggctgggtgcgccagatgcccgggaaaggcctggagtggatggggatcatctatcctggtgactctgaaaccagatacagcccgtccttccaaggccaggtcaccatctcagccgacaagtccatcaacaccgcctacctgcagtggagcagcctgaaggcctcggacaccgccatatattactgtgcggggggttcggggatttctacccctatggacgtctggggccaagggaccacggtcaccgtctcgagcggtacgggcggttcaggcggaaccggcagcggcactggcgggtcgacggacatccagttgacccagtctccagactccctggctgtgtctctgggcgagagggccaccatcaactgcaagtccagccagagtgttttatacagctccatcaataagaactacttagcttggtaccagcagaaaccaggacagcctcctaagctgctcatttactgggcatctacccgggaatccggggtccctgaccgattcagtggcagcgggtctgggacagatttcactctcaccatcagcagcctgcaggctgaagatgtggcagtttattactgtcagcaatattatagtactccgtacacttttggccaggggaccaaggtggaaatcaaacgtgcggcc

SEQ ID NO: 218 - protein, 254 aa, Artificial sequence
  SC03-022
AMAQMQLVQSGTEVKKPGESLKISCKGSGYGFITYWIGWVRQMPGKGLEWMGIIYPGDSETRYSPSFQGQVTISADKSINTAYLQWSSLKASDTAIYYCAGGSGISTPMDVWGQGTTVTVSSGTGGSGGTGSGTGGSTDIQLTQSPDSLAVSLGERATINCKSSQSVLYSSINKNYLAWYQQKPGQPPKLLIYWASTRESGVPDRFSGSGSGTDFTLTISSLQAEDVAVYYCQQYYSTPYTFGQGTKVEIKRAA

SEQ ID NO: 219 - DNA, 780 bp, Artificial sequence
  CDS (1)..(780): SC03-023
gccatggcccaggtgcagctacagcagtggggcgcaggactgttgaagccttcggagaccctgtccctcacctgcgctgtctatggtgggtctttcagtggtttctactggagctggatccgccagcccccagggaaggggctggagtggattggggaaatcaatcatagtggaagcaccaactacaacccgtccctcaagagtcgagtcaccatatcagtagacacgtccaagaaccagttctccctgaagctgagctctgtgaccgccgcggacacggctgtgtattactgtgcgagaagggtggaggtagtagagtaccagctgctccgtccccgatataaaagttggttcgacccctggggccagggcaccctggtcaccgtctcgagcggtacgggcggttcaggcggaaccggcagcggcactggcgggtcgacgcagtctgccctgactcagcctcgctcagtgtccgggtctcctggacagtcagtcaccatctcctgcactggatccagcagtactgttggtggttataactatgtctcctggtaccaacagcacccaggcaaagcccccaaactcatgatttatgatgtcagtaagcggccctcaggggtttctaatcgcttctctggctccaagtctggcaacacggcctccctgaccatctctgggctccaggctgaggacgaggctgattattactgcagctcatatacaagcagcagcacttatgtcttcggaactgggaccaaggtcaccgtcctaggtgcggcc

SEQ ID NO: 220 - protein, 260 aa, Artificial sequence
  SC03-023
AMAQVQLQQWGAGLLKPSETLSLTCAVYGGSFSGFYWSWIRQPPGKGLEWIGEINHSGSTNYNPSLKSRVTISVDTSKNQFSLKLSSVTAADTAVYYCARRVEVVEYQLLRPRYKSWFDPWGQGTLVTVSSGTGGSGGTGSGTGGSTQSALTQPRSVSGSPGQSVTISCTGSSSTVGGYNYVSWYQQHPGKAPKLMIYDVSKRPSGVSNRFSGSKSGNTASLTISGLQAEDEADYYCSSYTSSSTYVFGTGTKVTVLGAA

SEQ ID NO: 221 - DNA, 753 bp, Artificial sequence
  CDS (1)..(753): SC03-024
gccatggcccaggtgcagctggtggagtctgggtctgagttgaagatccctggggcctcagtgaaggtttcctgcaaggctactggatacaccttcactcgttattctctgaattgggtgcggcaggcccctggacaagggcttgagtgggtggggtggattaacacccagactggaaactcaaactatggccaggccttctcaggacggtttgtcttctccttggacacctcagtcagcacggcatatttgcaaatcagcagcctacaggccgaggacactgccacatactactgtgcgaggaagagtgcgggttcgaatgctttcgacatttggggccaagggacaatggtcaccgtctcgagcggtacgggcggttcaggcggaaccggcagcggcactggcgggtcgacgcagtctgtcgtgacgcagccgccctcagtgtctgcggccccaggacagaaggccaccatctcctgctctggaagcagctccaacattgggaataattatgtatcctggtaccagcagctcccaggaacagcccccaaactcctcatttatgacaataataagcgaccctcagggattcctaaccgattctctggctccaagtctggcacgtcagccaccctgggcatcaccggactccagactggggacgaggccgattattactgcggaacatgggatagcagcctgagtgcttatgtcttcggaactgggaccaaggtcaccgtcctaggtgcggcc

SEQ ID NO: 222 - protein, 251 aa, Artificial sequence
  SC03-024
AMAQVQLVESGSELKIPGASVKVSCKATGYTFTRYSLNWVRQAPGQGLEWVGWINTQTGNSNYGQAFSGRFVFSLDTSVSTAYLQISSLQAEDTATYYCARKSAGSNAFDIWGQGTMVTVSSGTGGSGGTGSGTGGSTQSVVTQPPSVSAAPGQKATISCSGSSSNIGNNYVSWYQQLPGTAPKLLIYDNNKRPSGIPNRFSGSKSGTSATLGITGLQTGDEADYYCGTWDSSLSAYVFGTGTKVTVLGAA

SEQ ID NO: 223 - DNA, 756 bp, Artificial sequence
  CDS (1)..(756): SC03-025
gccatggccgaggtgcagctggtggagtctgggggaggcttggtccagcctggggggtccctgagactctcctgtgcagcctctggattcaccttcagtagttatgctatgcactgggtccgccaggctccagggaagggactggaatatgtttcaggtattagtagtaatgggggtagcacatattatgcaaactctgtgaagggcagattcaccatctccagagacaattccaagaacacgctgtatcttcaaatgggcagcctgagagctgaggacatggctgtgtattactgtgcgagaactactaatcgggcttttgatatctggggccaagggacaatggtcaccgtctcgagcggtacgggcggttcaggcggaaccggcagcggcactggcgggtcgacggacatccagttgacccagtctccagactccctggctgtgtctctgggcgagagggccaccatcaactgcaagtccagccagagtgttttatacagctccaacaataagaactacttagcttggtaccagcagaaaccaggacagcctcctaagctgctcatttactgggcatctatccgggaatccggggtccctgaccgattcagtggcagcgggtctgggacagatttcactctcaccatcagcagcctgcaggctgaagatgtggcagtttattactgtcagcaatattataatattccgtatgctttcggccaggggaccaagctggagatcaaacgtgcggcc

SEQ ID NO: 224 - protein, 252 aa, Artificial sequence
  SC03-025
AMAEVQLVESGGGLVQPGGSLRLSCAASGFTFSSYAMHWVRQAPGKGLEYVSGISSNGGSTYYANSVKGRFTISRDNSKNTLYLQMGSLRAEDMAVYYCARTTNRAFDIWGQGTMVTVSSGTGGSGGTGSGTGGSTDIQLTQSPDSLAVSLGERATINCKSSQSVLYSSNNKNYLAWYQQKPGQPPKLLIYWASIRESGVPDRFSGSGSGTDFTLTISSLQAEDVAVYYCQQYYNIPYAFGQGTKLEIKRAA

SEQ ID NO: 225 - DNA, 756 bp, Artificial sequence
  CDS (1)..(756): SC03-026
gccatggcccaggtccagctggtacagtctgggggaggcttggtccagcctggggggtccctgagactctcctgtgcagcctctggattcaccttcagtagttatgccatgcactgggtccgccaggctccagggaagggactggaatatgtttcaggtattagtagtaatgggggtagcacatattatgcaaactctgtgaagggcagattcaccatctccagagacaattccaagaacacgctgtatcttcaaatgggcagcctgagagctgaggacatggctgtgtattactgtgcgagaactactaatcgggcttttgatatctggggccaagggacaatggtcaccgtctcgagcggtacgggcggttcaggcggaaccggcagcggcactggcgggtcgacggacatccagatgacccagtctccagactccctggctgtgtctctgggcgagagggccaccatcaactgcaagtccagccagagtattttatacagctccaacagtaagaactacttaggttggtaccagcagaaaccaggacagcctcctaagctgctcatttactgggcatctacccgggaatccggggtccctgaccgattcagtggcagcgggtctgggacagatttcactctcaccatcagcagcctgcaggctgaagatgtggcagtttattactgtcagcaatattatagtactccgtacagttttggccaggggaccaaggtggagatcaaacgtgcggcc

SEQ ID NO: 226 - protein, 252 aa, Artificial sequence
  SC03-026
AMAQVQLVQSGGGLVQPGGSLRLSCAASGFTFSSYAMHWVRQAPGKGLEYVSGISSNGGSTYYANSVKGRFTISRDNSKNTLYLQMGSLRAEDMAVYYCARTTNRAFDIWGQGTMVTVSSGTGGSGGTGSGTGGSTDIQMTQSPDSLAVSLGERATINCKSSQSILYSSNSKNYLGWYQQKPGQPPKLLIYWASTRESGVPDRFSGSGSGTDFTLTISSLQAEDVAVYYCQQYYSTPYSFGQGTKVEIKRAA

SEQ ID NO: 227 - DNA, 756 bp, Artificial sequence
  CDS (1)..(756): SC03-027
gccatggcccaggtccagctggtgcagtctgggggaggcttggtccagcctggggggtccctgagactctcctgtgcagcctctggattcaccttcagtagttatgctatgcactgggtccgccaggctccagggaagggactggaatatgtttcaggtattagtagtaatgggggtagcacatattatgcaaactctgtgaagggcagattcaccatctccagagacaattccaagaacacgctgtatcttcaaatgggcagcctgagagctgaggacatggctgtgtattactgtgcgagaactactaatcgggcttttgatatctggggccaagggacaatggtcaccgtctcgagcggtacgggcggttcaggcggaaccggcagcggcactggcgggtcgacggacatccagatgacccagtctccagactccctggctgtgtctctgggcgagagggccaccatcaactgcaagtccagccagagtgttttatacagctccaacaataagaactacttagcttggtaccagcagaaaccaggacagcctcctaagctgctcatttactgggcatctacccgggaatccggggtccctgaccgattcagtggcagcgggtctgggacagatttcactctcaccatcagcagcctgcaggctgaagatgtggcagtttattactgtcagcaatattatagtactccgtacagttttggccaggggaccaaagtggatatcaaacgtgcggcc

SEQ ID NO: 228 - protein, 252 aa, Artificial sequence
  SC03-027
AMAQVQLVQSGGGLVQPGGSLRLSCAASGFTFSSYAMHWVRQAPGKGLEYVSGISSNGGSTYYANSVKGRFTISRDNSKNTLYLQMGSLRAEDMAVYYCARTTNRAFDIWGQGTMVTVSSGTGGSGGTGSGTGGSTDIQMTQSPDSLAVSLGERATINCKSSQSVLYSSNNKNYLAWYQQKPGQPPKLLIYWASTRESGVPDRFSGSGSGTDFTLTISSLQAEDVAVYYCQQYYSTPYSFGQGTKVDIKRAA

SEQ ID NO: 229 - DNA, 756 bp, Artificial sequence
  CDS (1)..(756): SC03-029
gccatggccgaagtgcagctggtgcagtctgggggaggcttggttcagccgggggggtccctgagactctcctgtgcagcctctggattcaccttcagtagttatgctatgcactgggtccgccaggctccagggaagggactggaatatgtttcaggtattagtagtaatgggggtagcacatattatgcaaactctgtgaagggcagattcaccatctccagagacaattccaagaacacgctgtatcttcaaatgggcagcctgagagctgaggacatggctgtgtattactgtgcgagaactactaatcgggcttttgatatctggggccaagggacaatggtcaccgtctcgagcggtacgggcggttcaggcggaaccggcagcggcactggcgggtcgacggacatccagatgacccagtctccagactccctggctgtgtctctgggcgagagggccaccatcaactgcaagtccagccagagtgttttatacagctccaacaataagaactacttagcttggtaccagcagaaaccaggacagcctcctaagctgctcatttactgggcatctacccgggaatccggggtccctgaccgattcagtggcagcgggtctgggacagatttcactctcaccatcagcagcctgcaggctgaagatgtggcagtttattactgtcagcaatattatagtactcctctcactttcggcgcagggaccaagctggagatcaaacgtgcggcc

SEQ ID NO: 230 - protein, 252 aa, Artificial sequence
  SC03-029
AMAEVQLVQSGGGLVQPGGSLRLSCAASGFTFSSYAMHWVRQAPGKGLEYVSGISSNGGSTYYANSVKGRFTISRDNSKNTLYLQMGSLRAEDMAVYYCARTTNRAFDIWGQGTMVTVSSGTGGSGGTGSGTGGSTDIQMTQSPDSLAVSLGERATINCKSSQSVLYSSNNKNYLAWYQQKPGQPPKLLIYWASTRESGVPDRFSGSGSGTDFTLTISSLQAEDVAVYYCQQYYSTPLTFGAGTKLEIKRAA

SEQ ID NO: 231 - DNA, 756 bp, Artificial sequence
  CDS (1)..(756): SC03-030
gccatggcggaggtccaggtggtacagtctggaggaggcttggtccagcctggggggtccctcaaactctcctgtgcagcctctggattcaccttcagtagttatgctatgcactgggtccgccaggctccagggaagggactggaatatgtttcaggtattagtagtaatgggggtagcacatattatgcaaactctgtgaagggcagattcaccatctccagagacaattccaagaacacgctgtatcttcaaatgggcagcctgagagctgaggacatggctgtgtattactgtgcgagaactactaatcgggcttttgatatctggggccaagggacaatggtcaccgtctcgagcggtacgggcggttcaggcggaaccggcagcggcactggcgggtcgacggacatccagatgacccagtctccagactccctggctgtgtctctgggcgagagggccaccatcaactgcaagtccagccagagtgttttatacagctccaacaataagaactacttagcttggtaccagcagaaaccaggacagcctcctaagctgctcatttactgggcatctacccgggaatccggggtccctgaccgattcagtggcagcgggtctgggacagattttactctcaccatcagcagtctgcaggctgaagatgtggcagtttattactgtcagcaatattatagtactcctctgacgttcggccaagggaccaaggtggaaatcaaacgtgcggcc

SEQ ID NO: 232 - protein, 252 aa, Artificial sequence
  SC03-030
AMAEVQVVQSGGGLVQPGGSLKLSCAASGFTFSSYAMHWVRQAPGKGLEYVSGISSNGGSTYYANSVKGRFTISRDNSKNTLYLQMGSLRAEDMAVYYCARTTNRAFDIWGQGTMVTVSSGTGGSGGTGSGTGGSTDIQMTQSPDSLAVSLGERATINCKSSQSVLYSSNNKNYLAWYQQKPGQPPKLLIYWASTRESGVPDRFSGSGSGTDFTLTISSLQAEDVAVYYCQQYYSTPLTFGQGTKVEIKRAA

SEQ ID NO: 233 - DNA, 759 bp, Artificial sequence
  CDS (1)..(759): SC03-031
gccatggcccaggtgcagctggtgcaatctggggctgacgtgaagaagcctgggtcctcggtgaaggtctcctgcgaggcttctggaggcacgttcagcagctatgctatcagctgggtgcgacaggcccctggacaagggcttgagtggatgggaaggatcatccctatccttggtataacaaactacgcacagaagttccagggcagagtcacaattaccgcggacaaatccacgggcacaggcaacatggagctgagcagcctgagatctgaggacacggccgtgtattactgtgcgagagaatcgggtggtggctacgataaccactttgactactggggccagggaaccctggtcaccgtctcgagcggtacgggcggttcaggcggaaccggcagcggcactggcgggtcgacgcagtctgtgctgacgcagccgccctcagcgtctgggacccccggacagagggtcaccatctcttgttctggaggcagctccaacatcggaagtaatactgtaaactggtaccagcaactcccaggaacggcccccaaactcgtcatctatgctaataatcagcggccctcaggggtccctgaccgattctctgcctccaagtctggcacctcagcctccctggccatcagtgggctccagtctgaggatgaggctgattattactgtgcagcttgggatgacagcctgactggtggagtgttcggcggagggacccagctcaccgttttaagtgcggcc

SEQ ID NO: 234 - protein, 253 aa, Artificial sequence
  SC03-031
AMAQVQLVQSGADVKKPGSSVKVSCEASGGTFSSYAISWVRQAPGQGLEWMGRIIPILGITNYAQKFQGRVTITADKSTGTGNMELSSLRSEDTAVYYCARESGGGYDNHFDYWGQGTLVTVSSGTGGSGGTGSGTGGSTQSVLTQPPSASGTPGQRVTISCSGGSSNIGSNTVNWYQQLPGTAPKLVIYANNQRPSGVPDRFSASKSGTSASLAISGLQSEDEADYYCAAWDDSLTGGVFGGGTQLTVLSAA

SEQ ID NO: 235 - DNA, 771 bp, Artificial sequence
  CDS (1)..(771): SC03-032
gccatggccgaggtgcagctggtggagtctggggctgaggtgaagaagcctgggtcctcggtgaaggtctcctgcaaggcttctggaggcaccttcagcagctatgctatcagctgggtgcgacaggcccctggacaagggcttgagtggatgggaaagatcatccctattcttggtaaagtcacttacgcacagaagttccaggccagagtcacgattaccgcggacgaatccacgagcacagcctacctggagctgagcagcctgagatctgaggacacggccgttttttactgtgcgagagacggctgggatttgactggttcttttttaggctacggtatggacgtctggggccaagggaccacggtcaccgtctcgagcggtacgggcggttcaggcggaaccggcagcggcactggcgggtcgacgcagtctgtcgtgacgcagccgccctcagcgtctgggacccccgggcagagggtcaccatctcttgttctggaagcagctccaacatcggaagtaatactgtaagctggtaccagcaggttccagggacggcccccaagctcctcatctataggaataatcagcggcccccaggggtccytgaccgattctctggctccaagtctggcacctcagcctccytggccatcagtgggctccagtctgacgatgaggccttttattactgtgcagcatgggatggcagcmtgaatggtctggccttcggcggagggaccaagctgaccgtcctaggtgcggcc

SEQ ID NO: 236 - protein, 257 aa, Artificial sequence
  misc_feature (204)..(204): The 'Xaa' at location 204 stands for Pro, or Leu.
  misc_feature (218)..(218): The 'Xaa' at location 218 stands for Leu.
  misc_feature (240)..(240): The 'Xaa' at location 240 stands for Met, or Leu.
  SC03-032
AMAEVQLVESGAEVKKPGSSVKVSCKASGGTFSSYAISWVRQAPGQGLEWMGKIIPILGKVTYAQKFQARVTITADESTSTAYLELSSLRSEDTAVFYCARDGWDLTGSFLGYGMDVWGQGTTVTVSSGTGGSGGTGSGTGGSTQSVVTQPPSASGTPGQRVTISCSGSSSNIGSNTVSWYQQVPGTAPKLLIYRNNQRPPGVXDRFSGSKSGTSASXAISGLQSDDEAFYYCAAWDGSXNGLAFGGGTKLTVLGAA

SEQ ID NO: 237 - DNA, 765 bp, Artificial sequence
  CDS (1)..(765): SC03-033
gccatggcccaggtccagctggtacagtctggaacagaggtgaaaaagccgggggagtctctgaagatctcctgtaagggttctggatacggctttatcacctactggatcggctgggtgcgccagatgcccgggaaaggcctggagtggatggggatcatctatcctggtgactctgaaaccagatacagcccgtccttccaaggccaggtcaccatctcagccgacaagtccatcaacaccgcctacctgcagtggagcagcctgaaggcctcggacaccgccatatattactgtgcggggggttcggggatttctacccctatggacgtctggggccaagggaccacggtcaccgtctcgagcggtacgggcggttcaggcggaaccggcagcggcactggcgggtcgacggatgttgtgatgactcagtctccagactccctggctgtgtctctgggcgagagggccaccatcaactgcaagaccagccacaatattttctccagatccaacaataaggactacttagcttggtaccagcagaaaccaggccagcctcccagattactcatttactgggcgtctacccgggcatccggggtccctgaacgattcagtggcagcggctctgggacagacttcagtctcaccatcagcagcctgcaggctgaagatgtggcggtttattactgtcagcaatattatagttcccctatgtacagttttggccaggggaccaaggtggagatcaaacgtgcggcc

SEQ ID NO: 238 - protein, 255 aa, Artificial sequence
  SC03-033
AMAQVQLVQSGTEVKKPGESLKISCKGSGYGFITYWIGWVRQMPGKGLEWMGIIYPGDSETRYSPSFQGQVTISADKSINTAYLQWSSLKASDTAIYYCAGGSGISTPMDVWGQGTTVTVSSGTGGSGGTGSGTGGSTDVVMTQSPDSLAVSLGERATINCKTSHNIFSRSNNKDYLAWYQQKPGQPPRLLIYWASTRASGVPERFSGSGSGTDFSLTISSLQAEDVAVYYCQQYYSSPMYSFGQGTKVEIKRAA

SEQ ID NO: 239 - DNA, 762 bp, Artificial sequence
  CDS (1)..(762): SC03-034
gccatggccgaggtgcagctggtgcagtctggagcagaggtgaaaaagccgggggagtctctgaagatctcctgtaagggttctggatacggctttatcacctactggatcggctgggtgcgccagatgcccgggaaaggcctggagtggatggggatcatctatcctggtgactctgaaaccagatacagcccgtccttccaaggccaggtcaccatctcagccgacaagtccatcaacaccgcctacctgcagtggagcagcctgaaggcctcggacaccgccatatattactgtgcggggggttcggggatttctacccctatggacgtctggggccaagggaccacggtcaccgtctcgagcggtacgggcggttcaggcggaaccggcagcggcactggcgggtcgacggatgttgtgatgactcagtctccagactccctggctgtgtctctgggcgagagggccaccatcaactgcaagtccagccagagtattttaaacagatccaacaataagaactacttagcttggtaccagcagaaaccaggacagcctcctaagctgctcatttactgggcatctacccgggaatccggggtccctgaccgattcagtggcagcgggtctgggacagatttcaatctcaccatcagcagcctgcaggctgaggatgtggcagtttattactgtcagcagtataataactggcctctcactttcggcggagggaccaaagtggatatcaaacgtgcggcc

SEQ ID NO: 240 - protein, 254 aa, Artificial sequence
  SC03-034
AMAEVQLVQSGAEVKKPGESLKISCKGSGYGFITYWIGWVRQMPGKGLEWMGIIYPGDSETRYSPSFQGQVTISADKSINTAYLQWSSLKASDTAIYYCAGGSGISTPMDVWGQGTTVTVSSGTGGSGGTGSGTGGSTDVVMTQSPDSLAVSLGERATINCKSSQSILNRSNNKNYLAWYQQKPGQPPKLLIYWASTRESGVPDRFSGSGSGTDFNLTISSLQAEDVAVYYCQQYNNWPLTFGGGTKVDIKRAA

SEQ ID NO: 241 - DNA, 765 bp, Artificial sequence
  CDS (1)..(765): SC03-035
gccatggccgaggtgcagctggtgcagtctggagcagaggtgaaaaagcccggggagtctctgaagatctcctgtaagggttctggatacggctttatcacctactggatcggctgggtgcgccagatgcccgggaaaggcctggagtggatggggatcatctatcctggtgactctgaaaccagatacagcccgtccttccaaggccaggtcaccatctcagccgacaagtccatcaacaccgcctacctgcagtggagcagcctgaaggcctcggacaccgccatatattactgtgcggggggttcggggatttctacccctatggacgtctggggccaagggaccacggtcaccgtctcgagcggtacgggcggttcaggcggaaccggcagcggcactggcgggtcgacggacatccagatgacccagtctccagactccctggctgtgtctctgggcgagagggccaccatcaactgcaagtccagtcagagtgttttatacagctccaacaataagaactacttagcttggtaccagcagaaaccaggacagcctcctaagctgctcatttactgggcatctacccgggaatccggggtccctgaccgattcagtggcagcgggtctgggacagatttcactctcaccatcagcagcctgcaggctgaagatgtggcagtttattactgtcagcaatattatagtactcccctgtacagttttggccaggggaccaaggtggagatcaaacctgcggcc

SEQ ID NO: 242 - protein, 255 aa, Artificial sequence
  SC03-035
AMAEVQLVQSGAEVKKPGESLKISCKGSGYGFITYWIGWVRQMPGKGLEWMGIIYPGDSETRYSPSFQGQVTISADKSINTAYLQWSSLKASDTAIYYCAGGSGISTPMDVWGQGTTVTVSSGTGGSGGTGSGTGGSTDIQMTQSPDSLAVSLGERATINCKSSQSVLYSSNNKNYLAWYQQKPGQPPKLLIYWASTRESGVPDRFSGSGSGTDFTLTISSLQAEDVAVYYCQQYYSTPLYSFGQGTKVEIKPAA

SEQ ID NO: 243 - DNA, 759 bp, Artificial sequence
  CDS (1)..(759): SC03-036
gccatggccgaggtgcagctggtgcagtctggaacagaggtgaaaaagccgggggagtctctgaagatctcctgtaagggttctggatacggctttatcacctactggatcggctgggtgcgccagatgcccgggaaaggcctggagtggatggggatcatctatcctggtgactctgaaaccagatacagcccgtccttccaaggccaggtcaccatctcagccgacaagtccatcaacaccgcctacctgcagtggagcagcctgaaggcctcggacaccgccatatattactgtgcggggggttcggggatttctacccctatggacgtctggggccaagggaccacggtcaccgtctcgagcggtacgggcggttcaggcggaaccggcagcggcactggcgggtcgacggacatccagatgacccagtctccagactccctggctgtgtctctgggcgagagggccaccatcaactgcaagtccagccagagtgttttacacagccccaacaataagaactacttggcttggtaccagcagaaaccaggacagcctcctaagctgctcatttactgggcatctacccgggaatccggggtccctgaccgattcagtggcagcgggtctgggacagatttcactctcaccatcagcagcctgcaggctgaagatgtggcagtttattactgtcagcaatattatagtactaacagttttggccaggggaccaagctggagatcaaacgtgcggcc

SEQ ID NO: 244 - protein, 253 aa, Artificial sequence
  SC03-036
AMAEVQLVQSGTEVKKPGESLKISCKGSGYGFITYWIGWVRQMPGKGLEWMGIIYPGDSETRYSPSFQGQVTISADKSINTAYLQWSSLKASDTAIYYCAGGSGISTPMDVWGQGTTVTVSSGTGGSGGTGSGTGGSTDIQMTQSPDSLAVSLGERATINCKSSQSVLHSPNNKNYLAWYQQKPGQPPKLLIYWASTRESGVPDRFSGSGSGTDFTLTISSLQAEDVAVYYCQQYYSTNSFGQGTKLEIKRAA

SEQ ID NO: 245 - DNA, 744 bp, Artificial sequence
  CDS (1)..(744): SC03-037
gccatggccaaagtgcagctggtgcagtctggaggaggcttgatccagcctggggggtccctgagactctcctgtgcagcctctggattcaccgtcagtagcaactacatgagctgggtccgccaggctccagggaaggggctggagtgggtctcaattgtttttagcggtggtagcacatactacgcagactccgtgaagggccgattcaccatctccagagacaattccaagaacacgctgtatcttcaaatgaacagcctgagagccgaggacacggccgtatattattgtgcgagagatgcccaccgggggttcggtatggacgtctggggccaagggaccacggtcaccgtctcgagcggtacgggcggttcaggcggaaccggcagcggcactggcgggtcgacgtcttctgagctgactcaggaccctgctgtgtctgtggccttgggacagacagtcaggatcacatgccaaggagacagcctcagaagctattatgcaagctggtaccagcagaagccaggacaggcccctgtacttgtcatctatggcaaaaacaaccggccctcagggatcccagaccggttctctggctccagctcaggaaacacagcttccttgaccatcactggggctcaggcggaagatgaggccgactattattgtaacggccgggacagcagtggtaaccattgggtgttcggcggagggaccaagctgaccgtcctaggtgcggcc

SEQ ID NO: 246 - protein, 248 aa, Artificial sequence
  SC03-037
AMAKVQLVQSGGGLIQPGGSLRLSCAASGFTVSSNYMSWVRQAPGKGLEWVSIVFSGGSTYYADSVKGRFTISRDNSKNTLYLQMNSLRAEDTAVYYCARDAHRGFGMDVWGQGTTVTVSSGTGGSGGTGSGTGGSTSSELTQDPAVSVALGQTVRITCQGDSLRSYYASWYQQKPGQAPVLVIYGKNNRPSGIPDRFSGSSSGNTASLTITGAQAEDEADYYCNGRDSSGNHWVFGGGTKLTVLGAA

SEQ ID NO: 247 - DNA, 744 bp, Artificial sequence
  CDS (1)..(744): SC03-038
gccatggccgaggtgcagctggtgcagtctggaggaggcttgatccagcctggggggtccctgagactctcctgtgcagcctctgggttcaccgtcagtagcaactacatgagctgggtccgccaggctccagggaaggggctggagtgggtctcaattgtttttagcggtggtagcacatactacgcagactccgtgaagggccgattcaccatctccagagacaattccaagaacacgctgtatcttcaaatgaacagcctgagagccgaggacacggccgtatattattgtgcgagagatgcccatcgggggttcggtatggacgtctggggccaggggaccacggtcaccgtctcgagcggtacgggcggttcaggcggaaccggcagcggcactggcgggtcgacgtcttctgagctgactcaggaccctgctgtgtctgtggccttgggacagacagtcaggatcacatgccaaggagacagcctcagaagctattatgcaagctggtaccagcagaagccaggacaggcccctgtacttgtcatctatggtaaaaacaaccggccctcagggatcccagaccgattctctggctccagctcaggagacacagcttccttgaccatcactggggctcaggcggaagatgaggctgactattactgtaactcccgggacagcagtggtaaccattgggtgttcggcggagggaccaagctgaccgtcctaggtgcggcc

SEQ ID NO: 248 - protein, 248 aa, Artificial sequence
  SC03-038
AMAEVQLVQSGGGLIQPGGSLRLSCAASGFTVSSNYMSWVRQAPGKGLEWVSIVFSGGSTYYADSVKGRFTISRDNSKNTLYLQMNSLRAEDTAVYYCARDAHRGFGMDVWGQGTTVTVSSGTGGSGGTGSGTGGSTSSELTQDPAVSVALGQTVRITCQGDSLRSYYASWYQQKPGQAPVLVIYGKNNRPSGIPDRFSGSSSGDTASLTITGAQAEDEADYYCNSRDSSGNHWVFGGGTKLTVLGAA

SEQ ID NO: 249 - DNA, 759 bp, Artificial sequence
  CDS (1)..(759): SC03-039
gccatggccgaggtgcagctggtggagtctgggggaggcttggtacagcctggggggtccctgagactctcctgtgcagcctctggattcacctttagcagctatgccatgagctgggtccgccaggctccagggaaggggctggagtgggtctcagttatttatagcggtggtactagtacatactatgcagactccgtgaagggccggttcaccatctccagagataattccaagaacacactgtatctgcaaatgaacagcctgagagccgaggacacggccgtatatttctgtgcgaaaggatctaaatggaacgacgtgggggggggtgactactggggccagggaaccctggtcaccgtctcgagcggtacgggcggttcaggcggaaccggcagcggcactggcgggtcgacgaattttatgctgactcagccccactctgtgtcggagtctccggggaagacggtaaccatctcctgcgccggcagcagtggcagcattgccagcaactatgtgcagtggtaccagcaacgcccgggcagtgcccccactactgtgatctatgaggataaccaaagaccctctggggtccctgatcggttctctggctccatcgacagctcctccaactctgcctccctcaccatctctggactgaagactgaggacgaggctgactactactgtcagtcttatgatggttatctttggattttcggcggagggaccaagctgaccgtcctaggtgcggcc

SEQ ID NO: 250 - protein, 253 aa, Artificial sequence
  SC03-039
AMAEVQLVESGGGLVQPGGSLRLSCAASGFTFSSYAMSWVRQAPGKGLEWVSVIYSGGTSTYYADSVKGRFTISRDNSKNTLYLQMNSLRAEDTAVYFCAKGSKWNDVGGGDYWGQGTLVTVSSGTGGSGGTGSGTGGSTNFMLTQPHSVSESPGKTVTISCAGSSGSIASNYVQWYQQRPGSAPTTVIYEDNQRPSGVPDRFSGSIDSSSNSASLTISGLKTEDEADYYCQSYDGYLWIFGGGTKLTVLGAA

SEQ ID NO: 251 - DNA, 756 bp, Artificial sequence
  CDS (1)..(756): SC03-040
gccatggcccaggtccagctggtacagtctgggggaggcttggtccagcctggggggtccctgagactctcctgtgcagcctctggattcaccttcagtagttatgctatgcactgggtccgccaggctccagggaagggactggaatatgtttcaggtattagtagtaatgggggtagcacatattatgcaaactctgtgaagggcagattcaccatctccagagacaattccaagaacacgctgtatcttcaaatgggcagcctgagagctgaggacatggctgtgtattactgtgcgagaactactaatcgggcttttgatatctggggccaagggacaatggtcaccgtctcgagcggtacgggcggttcaggcggaaccggcagcggcactggcgggtcgacggacatccagatgacccagtctccagactccctggctgtgtctctgggcgagagggccaccatcaactgcaggtccagccagagtgttttatacagctccaacaataagaactacttagcttggtaccagcagaaaccaggacagcctcctaagctgctcatttactgggcatctacccgggaatccggggtccctgaccgattcagtggcagcgggtctgggacagatttcactctcaccatcagcagcctgcaggctgaagatgtggcagtttattactgtcagcaatattatagtagtccgtacagttttggccaggggaccaagctggagatcaaacgtgcggcc

SEQ ID NO: 252 - protein, 252 aa, Artificial sequence
  SC03-040
AMAQVQLVQSGGGLVQPGGSLRLSCAASGFTFSSYAMHWVRQAPGKGLEYVSGISSNGGSTYYANSVKGRFTISRDNSKNTLYLQMGSLRAEDMAVYYCARTTNRAFDIWGQGTMVTVSSGTGGSGGTGSGTGGSTDIQMTQSPDSLAVSLGERATINCRSSQSVLYSSNNKNYLAWYQQKPGQPPKLLIYWASTRESGVPDRFSGSGSGTDFTLTISSLQAEDVAVYYCQQYYSSPYSFGQGTKLEIKRAA

SEQ ID NO: 253 - DNA, 756 bp, Artificial sequence
  CDS (1)..(756): SC03-041
gccatggcccaggtccagctggtgcagtctgggggaggcttggtccagcctggggggtccctgagactctcctgtgcagcctctggattcaccttcagtagttatgctatgcactgggtccgccaggctccagggaagggactggaatatgtttcaggtattagtagtaatgggggtagcacatattatgcaaactctgtgaagggcagattcaccatctccagagacaattccaagaacacgctgtatcttcaaatgggcagcctgagagctgaggacatggctgtgtattactgtgcgagaactactaatcgggcttttgatatctggggccaagggacaatggtcaccgtctcgagcggtacgggcggttcaggcggaaccggcagcggcactggcgggtcgacggatatccagatgacccagtctccagactccctggctgtgtctctgggcgagcggaccaccatcaactgcaagtccagccagagtgttttatacagctccaacaataagaactacttagcttggtaccagcagaaaccaggacagcctcctaagctgctcatttactgggcatctacccgggaatccggggtccctgaccgattcagtggcagcgggtctgggacagatttcactctcaccatcagcagcctgcaggctgaagatgtggcagtttattactgtcagcaatattatagtactccgtacagttttggccaggggaccaagctggagatcaaacgtgcggcc

SEQ ID NO: 254 - protein, 252 aa, Artificial sequence
  SC03-041
AMAQVQLVQSGGGLVQPGGSLRLSCAASGFTFSSYAMHWVRQAPGKGLEYVSGISSNGGSTYYANSVKGRFTISRDNSKNTLYLQMGSLRAEDMAVYYCARTTNRAFDIWGQGTMVTVSSGTGGSGGTGSGTGGSTDIQMTQSPDSLAVSLGERTTINCKSSQSVLYSSNNKNYLAWYQQKPGQPPKLLIYWASTRESGVPDRFSGSGSGTDFTLTISSLQAEDVAVYYCQQYYSTPYSFGQGTKLEIKRAA

SEQ ID NO: 255 - DNA, 756 bp, Artificial sequence
  misc_feature (153)..(154): n can be a, g, c or t
  CDS (1)..(756): SC03-042
gccatggcccagatgcagctggtgcaatctgggggaggcttagttcagcctggggggtccctgagactttcctgtgcagcctctggattcaccttcagtagttatgctatgcactgggtccgccaggctccagggaagggactggaatatgtntcaggtattagtagtaatgggggtagcacatattatgcaaactctgtgaagggcagattcaccatctccagagacaattccaagaacacgctgtatcttcaaatgggcagcctgagagctgaggacatggctgtgtattactgtgcgagaactactaatcgggcttttgatatctggggccaagggacaatggtcaccgtctcgagcggtacgggcggttcaggcggaaccggcagcggcactggcgggtcgacggatgttgtgatgactcagtctccagactccctggctgtgtctctgggcgagagggccaccatcaactgcaagtccagccagagtgttttatacagctccaacgataagaactacttagcttggtaccagcagaaaccaggacagcctcctaagctgctcatttactgggcatctacccgggaatccggggtccctgaccgattcagcggcagcgggtctgggacagatttcactctcaccatcagcagcctgcaggctgaagatgtggcagtttattactgtcagcaatattatagtactccgtacagttttggccaggggaccaagctggagatcaaacgtgcggcc

SEQ ID NO: 256 - protein, 252 aa, Artificial sequence
  SC03-042
  misc_feature (153)..(154): n can be a, g, c or t
AMAQMQLVQSGGGLVQPGGSLRLSCAASGFTFSSYAMHWVRQAPGKGLEYVSGISSNGGSTYYANSVKGRFTISRDNSKNTLYLQMGSLRAEDMAVYYCARTTNRAFDIWGQGTMVTVSSGTGGSGGTGSGTGGSTDVVMTQSPDSLAVSLGERATINCKSSQSVLYSSNDKNYLAWYQQKPGQPPKLLIYWASTRESGVPDRFSGSGSGTDFTLTISSLQAEDVAVYYCQQYYSTPYSFGQGTKLEIKRAA

SEQ ID NO: 257 - DNA, 756 bp, Artificial sequence
  CDS (1)..(756): SC03-043
gccatggcccaggtccagctggtgcagtctgggggaggcttggtccagcctggggggtccctgagactctcctgtgcagcctctggattcaccttcagtagttatgctatgcactgggtccgccaggctccagggaagggactggaatatgtttcaggtattagtagtaatgggggtagcacatattatgcaaactctgtgaagggcagattcaccatctccagagacaattccaagaacacgctgtatcttcaaatgggcagcctgagagctgaggacatggctgtgtattactgtgcgagaactactaatcgggcttttgatatctggggccaagggacaatggtcaccgtctcgagcggtacgggcggttcaggcggaaccggcagcggcactggcgggtcgacggacatccagttgacccagtctccagactccctggctgtgtctctgggcgagagggccaccatcaactgcaagtccagccagagtgttttatacaggtccaacaataagaactacttagcttggtaccagcagaagccaggacagcctcctaagctgctcatttactgggcatctacccgtgaatccggggtctctgagcgattcagtggcagcgggtctgggacagatttcactctcaccatcagcagcctgcaggctgaagatgtggcagtttattactgtcagcaatattatagtaccccgtacagttttggccaggggaccaagctggagatcaaacgtgcggcc

SEQ ID NO: 258 - protein, 252 aa, Artificial sequence
  SC03-043
AMAQVQLVQSGGGLVQPGGSLRLSCAASGFTFSSYAMHWVRQAPGKGLEYVSGISSNGGSTYYANSVKGRFTISRDNSKNTLYLQMGSLRAEDMAVYYCARTTNRAFDIWGQGTMVTVSSGTGGSGGTGSGTGGSTDIQLTQSPDSLAVSLGERATINCKSSQSVLYRSNNKNYLAWYQQKPGQPPKLLIYWASTRESGVSERFSGSGSGTDFTLTISSLQAEDVAVYYCQQYYSTPYSFGQGTKLEIKRAA

SEQ ID NO: 259 - DNA, 756 bp, Artificial sequence
  CDS (1)..(756): SC03-044
gccatggccgaggtgcagctggtggagactgggggaggcttggtccagcctggggggtccctgagactctcctgtgcagcctctggattcaccttcagtagttatgctatgcactgggtccgccaggctccagggaagggactggaatatgtttcaggtattagtagtaatgggggtagcacatattatgcaaactctgtgaagggcagattcaccatctccagagacaattccaagaacacgctgtatcttcaaatgggcagcctgagagctgaggacatggctgtgtattactgtgcgagaactactaatcgggcttttgatatctggggccaagggacaatggtcaccgtctcgagcggtacgggcggttcaggcggaaccggcagcggcactggcgggtcgacggacatccagatgacccagtctccagactccctggctgtgtctctgggcgagagggccaccatcaactgcaagtccagccagagtgttttatacagctccaacaataagaactacttagcttggtaccagcagaaaccaggacagcctcctaagctgctcatttactgggcatctacccgggaatccggggtccctgaccgattcaggggcagcgggtccgggacagatttcactctcaccatcagcagcctgcaggctgaagatctggcagtttattactgtcagcaatattatagtactccgtacagttttggccaggggaccaagctggagatcaaacgtgcggcc

SEQ ID NO: 260 - protein, 252 aa, Artificial sequence
  SC03-044
AMAEVQLVETGGGLVQPGGSLRLSCAASGFTFSSYAMHWVRQAPGKGLEYVSGISSNGGSTYYANSVKGRFTISRDNSKNTLYLQMGSLRAEDMAVYYCARTTNRAFDIWGQGTMVTVSSGTGGSGGTGSGTGGSTDIQMTQSPDSLAVSLGERATINCKSSQSVLYSSNNKNYLAWYQQKPGQPPKLLIYWASTRESGVPDRFRGSGSGTDFTLTISSLQAEDLAVYYCQQYYSTPYSFGQGTKLEIKRAA

SEQ ID NO: 261 - DNA, 756 bp, Artificial sequence
  CDS (1)..(756): SC03-045
gccatggcccagctgcagctgcaggagtcggggggaggcttggtccagcctggggggtccctgagactctcctgtgcagcctctggattcaccttcagtagttatgctatgcactgggtccgccaggctccagggaagggactggaatatgtttcaggtattagtagtaatgggggtagtacatattatgcaaactctgtgaagggcagattcaccatctccagagacaattccaagaacacgctgtatcttcaaatgggcagcctgagagctgaggacatggctgtgtattactgtgcgagaactactaatcgggcttttgatatctggggccaggggacaatggtcaccgtctcgagcggtacgggcggttcaggcggaaccggcagcggcactggcgggtcgacggacatccagctgacccagtctccagactccctggctgtgtctctgggcgagagggccaccatcaactgcaagtccagccagagtgttttatacagctccaacaataagaactacttagcttggtaccagcagaaaccaggacagcctcctaagctgctcatttactgggcatctacccgggaatccggggtccctgaccgattcagtggcagcgggtctgggacagatttcactctcaccatcagcagcctgcaggctgaagatgtggcagtttattactgtcagcaatattatagtactccattcactttcggccctgggaccaaagtggatatcaaacgtgcggcc

SEQ ID NO: 262 - protein, 252 aa, Artificial sequence
  SC03-045
AMAQLQLQESGGGLVQPGGSLRLSCAASGFTFSSYAMHWVRQAPGKGLEYVSGISSNGGSTYYANSVKGRFTISRDNSKNTLYLQMGSLRAEDMAVYYCARTTNRAFDIWGQGTMVTVSSGTGGSGGTGSGTGGSTDIQLTQSPDSLAVSLGERATINCKSSQSVLYSSNNKNYLAWYQQKPGQPPKLLIYWASTRESGVPDRFSGSGSGTDFTLTISSLQAEDVAVYYCQQYYSTPFTFGPGTKVDIKRAA

SEQ ID NO: 263 - DNA, 756 bp, Artificial sequence
  CDS (1)..(756): SC03-046
gccatggccgaggtccagctggtacagtctgggggaggcttggtccagcctggggggtccctgagactctcctgtgcagcctctggattcaccttcagtagttatgctatgcactgggtccgccaggctccagggaagggactggaatatgtttcaggtattagtagtaatgggggtagcacatattatgcaaactctgtgaagggcagattcaccatctccagagacaattccaagaacacgctgtatcttcaaatgggcagcctgagagctgaggacatggctgtgtattactgtgcgagaactactaatcgggcttttgatatctggggccaagggacaatggtcaccgtctcgagcggtacgggcggttcaggcggaaccggcagcggcactggcgggtcgacggatgttgtgatgactcagtctccagactccctggctgtgtctctgggcgagagggccaccatcaactgcaagtccagccagagtgttttatacagctccaacaataagaactacttagcttggtaccagcagaaaccagggcagcctcctaagctgctcatttactgggcatctacccgggaatccggggtccctgacaggttcagtggcagcgggtctgggacagacttcagtctcaccatcagcagcctgcaggctgaagatgtggcggtttattactgtcagcaatattacagtcctccgtacacttttggcccggggaccaaggtggaaatcaaacgtgcggcc

SEQ ID NO: 264 - protein, 252 aa, Artificial sequence
  SC03-046
AMAEVQLVQSGGGLVQPGGSLRLSCAASGFTFSSYAMHWVRQAPGKGLEYVSGISSNGGSTYYANSVKGRFTISRDNSKNTLYLQMGSLRAEDMAVYYCARTTNRAFDIWGQGTMVTVSSGTGGSGGTGSGTGGSTDVVMTQSPDSLAVSLGERATINCKSSQSVLYSSNNKNYLAWYQQKPGQPPKLLIYWASTRESGVPDRFSGSGSGTDFSLTISSLQAEDVAVYYCQQYYSPPYTFGPGTKVEIKRAA

SEQ ID NO: 265 - DNA, 756 bp, Artificial sequence
  CDS (1)..(756): SC03-047
gccatggccgaggtgcagctggtgcagtctgggggaggcttggtccagcctggggggtccctgagactctcctgtgcagcctctggattcaccttcagtagttatgctatgcactgggtccgccaggctccagggaagggactggaatatgtttcaggtattagtagtaatgggggtagcacatattatgcaaactctgtgaagggcagattcaccatctccagagacaattccaagaacacgctgtatcttcaaatgggcagcctgagagctgaggacatggctgtgtattactgtgcgagaactactaatcgggcttttgatatctggggccaggggacaatggtcaccgtctcgagcggtacgggcggttcaggcggaaccggcagcggcactggcgggtcgacggatgttgtgatgactcagtctccagactccctggctgtgtctctgggcgagagggccaccatcaactgcaagtccagccagagtgttttatatagctccaacaataagaactacttagcttggtaccagcagaaaccaggacagcctcctaagctgctcatttactgggcatctacccgggaatccggggtccctgaccgattcagtggcagcgggtctgggacagatttcactctcaccatcagcagcctgcaggctgaagatgtggcagtttattactgtcagcaatattatagtactcctctcactttcggcggagggaccaaggtggaaatcaaacgtgcggcc

SEQ ID NO: 266 - protein, 252 aa, Artificial sequence
  SC03-047
AMAEVQLVQSGGGLVQPGGSLRLSCAASGFTFSSYAMHWVRQAPGKGLEYVSGISSNGGSTYYANSVKGRFTISRDNSKNTLYLQMGSLRAEDMAVYYCARTTNRAFDIWGQGTMVTVSSGTGGSGGTGSGTGGSTDVVMTQSPDSLAVSLGERATINCKSSQSVLYSSNNKNYLAWYQQKPGQPPKLLIYWASTRESGVPDRFSGSGSGTDFTLTISSLQAEDVAVYYCQQYYSTPLTFGGGTKVEIKRAA

SEQ ID NO: 267 - DNA, 756 bp, Artificial sequence
  CDS (1)..(756): SC03-048
gccatggccgaggtgcagctggtggagactgggggaggcttggtccagcctggggggtccctgagactctcctgtgcagcctctggattcaccttcagtagttatgctatgcactgggtccgccaggctccagggaagggactggaatatgtttcaggtattagtagtaatgggggtagcacatattatgcaaactctgtgaagggcagattcaccatctccagagacaattccaagaacacgctgtatcttcaaatgggcagcctgagagctgaggacatggctgtgtattactgtgcgagaactactaatcgggcttttgatatctggggccaagggacaatggtcaccgtctcgagcggtacgggcggttcaggcggaaccggcagcggcactggcgggtcgacggacatccagttgacccagtctccagactccctggctgtgtctctgggcgagagggccaccatcaactgcaagtccagccagagtgttttatacagctccaacaataagaactacttagcttggtaccagcagaaaccaggacagcctcctaagctgctcatttactgggcatctacccgggaatccggggtccctgaccgattcagtggcagcgggtctgggacagatttcactctcaccatcagcagcctgcaggctgaagatgtggcagtttattactgtcagcaatattacagtactccgctcactttcggcggagggaccaaggtggaaatcaaacgtgcggcc

SEQ ID NO: 268 - protein, 252 aa, Artificial sequence
  SC03-048
AMAEVQLVETGGGLVQPGGSLRLSCAASGFTFSSYAMHWVRQAPGKGLEYVSGISSNGGSTYYANSVKGRFTISRDNSKNTLYLQMGSLRAEDMAVYYCARTTNRAFDIWGQGTMVTVSSGTGGSGGTGSGTGGSTDIQLTQSPDSLAVSLGERATINCKSSQSVLYSSNNKNYLAWYQQKPGQPPKLLIYWASTRESGVPDRFSGSGSGTDFTLTISSLQAEDVAVYYCQQYYSTPLTFGGGTKVEIKRAA

SEQ ID NO: 269 - DNA, 756 bp, Artificial sequence
  CDS (1)..(756): SC03-049
gccatggcccaggtgcagctggtgcagtctgggggaggcttggtccagcctggggggtccctgagactctcctgtgcagcctctggattcaccttcagtagttatgctatgcactgggtccgccaggctccagggaagggactggaatatgtttcaggtattagtagtaatgggggtagcacatattatgcaaactctgtgaagggcagattcaccatctccagagacaattccaagaacacgctgtatcttcaaatgggcagcctgagagctgaggacatggctgtgtattactgtgcgagaactactaatcgggcttttgacatctggggccaagggacaatggtcaccgtctcgagcggtacgggcggttcaggcggaaccggcagcggcactggcgggtcgacggacatccagttgacccagtctccatcctccctggctgtgtctctgggcgagagggccaccatcaactgcaagtccagccagagtgttttatacagctccaacaataagaactacttagcttggtatcagcagaaaccaggacagcctcctaagctgctcatttactgggcatctacccgggaatccggggtccctgaccgattcagtggcagcgggtctgggacagatttcactctcaccatcagcagcctgcaggctgaagatgtggcagtttattactgtcagcaatattatagtactccgctcactttcggcggagggaccaaggtggagatcaaacgtgcggcc

SEQ ID NO: 270 - protein, 252 aa, Artificial sequence
  SC03-049
AMAQVQLVQSGGGLVQPGGSLRLSCAASGFTFSSYAMHWVRQAPGKGLEYVSGISSNGGSTYYANSVKGRFTISRDNSKNTLYLQMGSLRAEDMAVYYCARTTNRAFDIWGQGTMVTVSSGTGGSGGTGSGTGGSTDIQLTQSPSSLAVSLGERATINCKSSQSVLYSSNNKNYLAWYQQKPGQPPKLLIYWASTRESGVPDRFSGSGSGTDFTLTISSLQAEDVAVYYCQQYYSTPLTFGGGTKVEIKRAA

SEQ ID NO: 271 - DNA, 756 bp, Artificial sequence; identical to SEQ ID NO: 269
  CDS (1)..(756): SC03-050

SEQ ID NO: 272 - protein, 252 aa, Artificial sequence; identical to SEQ ID NO: 270
  SC03-050

SEQ ID NO: 273 - DNA, 762 bp, Artificial sequence
  CDS (1)..(762): SC03-051
gccatggcccaggtgcagctggtgcagtctggaacagaggtgaaaaagccgggggagtctctgaagatctcctgtaagggttctggatacggctttatcacctactggatcggctgggtgcgccagatgcccgggaaaggcctggagtggatggggatcatctatcctggtgactctgaaaccagatacagcccgtccttccaaggccaggtcaccatctcagccgacaagtccatcaacaccgcctacctgcagtggagcagcctgaaggcctcggacaccgccatatattactgtgcggggggttcggggatttctacccctatggacgtctggggccaagggaccacggtcaccgtctcgagcggtacgggcggttcaggcggaaccggcagcggcactggcgggtcgacggacatccagatgacccagtctccagactccctggctgtgtctctgggcgagagggccaccatcaactgcaagtccggccagagtattttatacagctccaacgataagaactacttagcttggtaccagcagaaaccaggacagcctcctaagcttctcatttactgggcatctacccgggaatccggggtccctgaccgattcagtggcagcgggtctgggacagatttcactctcaccatcagcagcctgcaggctgaagatgtggcagtttattactgtcagcaatattatagtactccgtacacttttggccaggggaccaaggtggaaatcaaacgtgcggcc

SEQ ID NO: 274 - protein, 254 aa, Artificial sequence
  SC03-051
AMAQVQLVQSGTEVKKPGESLKISCKGSGYGFITYWIGWVRQMPGKGLEWMGIIYPGDSETRYSPSFQGQVTISADKSINTAYLQWSSLKASDTAIYYCAGGSGISTPMDVWGQGTTVTVSSGTGGSGGTGSGTGGSTDIQMTQSPDSLAVSLGERATINCKSGQSILYSSNDKNYLAWYQQKPGQPPKLLIYWASTRESGVPDRFSGSGSGTDFTLTISSLQAEDVAVYYCQQYYSTPYTFGQGTKVEIKRAA

SEQ ID NO: 275 - DNA, 762 bp, Artificial sequence
  CDS (1)..(762): SC03-052
gccatggccgaagtgcagctggtgcagtctggaacagaggtgaaaaagccgggggagtctctgaaggtctcctgtaagggttctggatacggctttatcacctactggatcggctgggtgcgccagatgcccgggaaaggcctggagtggatggggatcatctatcctggtgactctgaaaccagatacagcccgtccttccaaggccaggtcaccatctcagccgacaagtccatcaacaccacctacctgcagtggagcagcctgaaggcctcggacaccgccatatattactgtgcggggggttcggggatttctacccctatggacgtctggggccaagggaccacggtcaccgtctcgagcggtacgggcggttcaggcggaaccggcagcggcactggcgggtcgacggacatccagatgacccagtctccagactccctggctgtgtctctgggcgagagggccaccatcaactgcaagtccagccagagtgttttatacagctccaacaataagaactacttagcttggtaccagcagaaaccaggacagcctcctaagctgctcatttactgggcatctacccgggaatccggggtccctgaccgattcagtggcagcgggtctgggacagatttcactctcaccatcagcagcctgcaggctgaagatgtggcagtttattactgtcagcaatattatagtactccgtacacttttggccaggggaccaaggtggaaatcaaacgtgcggcc

SEQ ID NO: 276 - protein, 254 aa, Artificial sequence
  SC03-052
AMAEVQLVQSGTEVKKPGESLKVSCKGSGYGFITYWIGWVRQMPGKGLEWMGIIYPGDSETRYSPSFQGQVTISADKSINTTYLQWSSLKASDTAIYYCAGGSGISTPMDVWGQGTTVTVSSGTGGSGGTGSGTGGSTDIQMTQSPDSLAVSLGERATINCKSSQSVLYSSNNKNYLAWYQQKPGQPPKLLIYWASTRESGVPDRFSGSGSGTDFTLTISSLQAEDVAVYYCQQYYSTPYTFGQGTKVEIKRAA

SEQ ID NO: 277 - DNA, 768 bp, Artificial sequence
  CDS (1)..(768): SC03-053
gccatggcccaggtgcagctggtgcagtctggggctgaggtgaagaagcctggggcctcagtgatggtttcctgcaaggcctctggatacaccttcagtaactatgctatgcattgggtgcgccagggccccggacaaaggcttgagtggatgggatggatcaacgctgacaaaggtcagacaaaatattcacagaagttccagggcagagtcaccattaccggggacacatccgccagcacagcctacatggacctgagcagcctgagatctgaagacacggctgtgtattactgtgcgagagggaccggatatttgcggagctaccacggcatggacgtctggggccaggggaccacggtcaccgtctcgagcggtacgggcggttcaggcggaaccggcagcggcactggcgggtcgacggatgttgtgatgactcagtctccaccctccctgcccgtcacccctggggagccggcctccatctcctgcaggtctagtcagagcctcctccatagtaatggatacaactatttggattggtacctgcagaagccaggtcagtctccacagctcctgatctatttgggttctaatcgggcctccggggtccctgacaggttcagtggcagtggatcaggcacagattttacactgaaaatcagcagagtggaggctgaggatgttggggtttattactgcatgcaagctctacaaactcctctcaccttcggccaagggacacgactggagattaaacgtgcggcc

SEQ ID NO: 278 - protein, 256 aa, Artificial sequence
  SC03-053
AMAQVQLVQSGAEVKKPGASVMVSCKASGYTFSNYAMHWVRQGPGQRLEWMGWINADKGQTKYSQKFQGRVTITGDTSASTAYMDLSSLRSEDTAVYYCARGTGYLRSYHGMDVWGQGTTVTVSSGTGGSGGTGSGTGGSTDVVMTQSPPSLPVTPGEPASISCRSSQSLLHSNGYNYLDWYLQKPGQSPQLLIYLGSNRASGVPDRFSGSGSGTDFTLKISRVEAEDVGVYYCMQALQTPLTFGQGTRLEIKRAA

SEQ ID NO: 279 - DNA, 756 bp, Artificial sequence
  CDS (1)..(756): SC03-054
gccatggccgaagtgcagctggtgcagtctgggggaggcgtggtccagcctgggaggtccctgagactctcctgtgcagcctctggattcaccttcagtagttatgctatgcactgggtccgccaggctccagggaagggactggaatatgtttcaggtattagtagtaatgggggtagcacatattatgcaaactctgtgaagggcagattcaccatctccagagacaattccaagaacacgctgtatcttcaaatgggcagcctgagagctgaggacatggctgtgtattactgtgcgagaactactaatcgggcttttgatatctggggccaagggacaatggtcaccgtctcgagcggtacgggcggttcaggcggaaccggcagcggcactggcgggtcgacggacatccagttgacccagtctccagactccctggctgtgtctctgggcgagagggccaccatcaactgcaagtccagccagagtgttttatacagctccaacaataagaactacttagcttggtaccagcagaaaccaggacagcctcctaagctgctcatttactgggcatctacccgggaatccggggtccctgaccgattcagtggcggcgggtctgggacagatttcactctcaccatcagcagcctgcaggctgaagatgtggcagtttattactgtcagcaatattatagtactccgtacagttttggccaggggaccaaggtggagatcaaacgtgcggcc

SEQ ID NO: 280 - protein, 252 aa, Artificial sequence
  SC03-054
AMAEVQLVQSGGGVVQPGRSLRLSCAASGFTFSSYAMHWVRQAPGKGLEYVSGISSNGGSTYYANSVKGRFTISRDNSKNTLYLQMGSLRAEDMAVYYCARTTNRAFDIWGQGTMVTVSSGTGGSGGTGSGTGGSTDIQLTQSPDSLAVSLGERATINCKSSQSVLYSSNNKNYLAWYQQKPGQPPKLLIYWASTRESGVPDRFSGGGSGTDFTLTISSLQAEDVAVYYCQQYYSTPYSFGQGTKVEIKRAA

SEQ ID NO: 281 - DNA, 780 bp, Artificial sequence
  CDS (1)..(780): SC03-055
gccatggcccaggtgcagctacagcagtggggcgcaggactgttgaagccttcggagaccctgtccctcacctgcgctgtctatggtgggtccttcagtggtttctactggagctggatccgccagcccccagggaaggggctggagtggattggggaaatcaatcatagtggaagcaccaactacaacccgtccctcaagagtcgagtcaccatatcagcagacacgtccaagaaccagttctccctgaagctgagctctgtgaccgccgcggacacggctgtgtattactgtgcgagaagggtggaggtagtagagtaccagctgctccgtccccgatataaaagttggttcgacccctggggccagggaaccctggtcaccgtctcgagcggtacgggcggttcaggcggaaccggcagcggcactggcgggtcgacgcagtctgtgttgacgcagccgccctcagtgtctggggccccagggcagagggtctccatctcctgctctggaagcggcgccaatggtgggactgatcctgtttcttggtaccagaaattcccaggaacagccccccacctcctcatttatgacaataataagcgaccctcagggattcctgaccgattctctggctccaagtctggcgcgtcagccaccctggacatcaccggactccagactggggacgaggccgactattactgcggagcatgggatcccagtctgagcggttatgtcttcgggactgggacccagctcaccgttttaagtgcggcc

SEQ ID NO: 282 - protein, 260 aa, Artificial sequence
  SC03-055
AMAQVQLQQWGAGLLKPSETLSLTCAVYGGSFSGFYWSWIRQPPGKGLEWIGEINHSGSTNYNPSLKSRVTISADTSKNQFSLKLSSVTAADTAVYYCARRVEVVEYQLLRPRYKSWFDPWGQGTLVTVSSGTGGSGGTGSGTGGSTQSVLTQPPSVSGAPGQRVSISCSGSGANGGTDPVSWYQKFPGTAPHLLIYDNNKRPSGIPDRFSGSKSGASATLDITGLQTGDEADYYCGAWDPSLSGYVFGTGTQLTVLSAA

SEQ ID NO: 283 - DNA, 762 bp, Artificial sequence
  CDS (1)..(762): SC03-056
gccatggccgaagtgcagctggtgcagtctggaacagaggtgaaaaagccgggggagtctctgaagatctcctgtaagggttctggatacggctttatcacctactggatcggctgggtgcgccagatgcccgggaaaggcctggagtggatggggatcatctatcctggtgactctgaaaccagatacagcccgtccttccaaggccaggtcaccatctcagccgacaagtccatcaacaccgcctacctgcagtggagcagcctgaaggcctcggacaccgccatatattactgtgcggggggttcggggatttctacccctatggacgtctggggccaagggaccacggtcaccgtctcgagcggtacgggcggttcaggcggaaccggcagcggcactggcgggtcgacggatgttgtgatgactcagtctccagactccctggctgtgtctctgggcgagagggccaccatcaactgcaagtccagccagagtgttttatacagctccaacaataagaactacttagcttggtaccagcagaaaccaggacagcctcctaagctgctcatttactgggcatctacccgggaatccggggtccctgaccgattcagtggcagcgggtctgggacagatttcactctcaccatcagcagcctgcaggctgaagatgtggcagtttattactgtcagcaatattatagtactccgtacagttttggccaggggaccaaggtggagatcaaacgtgcggcc

SEQ ID NO: 284 - protein, 254 aa, Artificial sequence
  SC03-056
AMAEVQLVQSGTEVKKPGESLKISCKGSGYGFITYWIGWVRQMPGKGLEWMGIIYPGDSETRYSPSFQGQVTISADKSINTAYLQWSSLKASDTAIYYCAGGSGISTPMDVWGQGTTVTVSSGTGGSGGTGSGTGGSTDVVMTQSPDSLAVSLGERATINCKSSQSVLYSSNNKNYLAWYQQKPGQPPKLLIYWASTRESGVPDRFSGSGSGTDFTLTISSLQAEDVAVYYCQQYYSTPYSFGQGTKVEIKRAA

SEQ ID NO: 285 - DNA, 768 bp, Artificial sequence
  CDS (1)..(768): SC03-057
gccatggcccaggtgcagctggtgcagtctggggctgaggtgaagaagcctgggtcctcggtgaaggtctcctgcaaggcttctggaggcaccttcagcagatatgctatcagttgggtgcgacaggcccctggacaaggccttgagtggatgggaaggatcaaccctatccttaatttaacaaactacgcacagaagttccagggcagagtcacgattaccgcggacaaatccacgagtacagcctacatggagatgagtagcctgagatctgaggacacggccatttattactgtgcgagcccggatatagtagtagccggtcacgcttcccccccacactacactatggacgtctggggccaagggaccacggtcaccgtctcgagcggtacgggcggttcaggcggaaccggcagcggcactggcgggtcgacggacatccagatgacccagtctccatcctcactgtctgcatctgtaggagacagagtcaccatcacttgccgggcaagtcagggcattagaaatgatttaggctggtatcagcagaaaccagggaaagcccctaacctcctgatctatcaggcatctgctttacagagtggggtcccatcaaggttcagcggcagtgaatctggggcagaattcactctcaccatcagcagcctgcaccctgatgattttgcaacttattactgccaacagtatcatgattttccgatcaccttcggccaagggacacgactggagattaaacgtgcggcc

SEQ ID NO: 286 - protein, 256 aa, Artificial sequence
  SC03-057
AMAQVQLVQSGAEVKKPGSSVKVSCKASGGTFSRYAISWVRQAPGQGLEWMGRINPILNLTNYAQKFQGRVTITADKSTSTAYMEMSSLRSEDTAIYYCASPDIVVAGHASPPHYTMDVWGQGTTVTVSSGTGGSGGTGSGTGGSTDIQMTQSPSSLSASVGDRVTITCRASQGIRNDLGWYQQKPGKAPNLLIYQASALQSGVPSRFSGSESGAEFTLTISSLHPDDFATYYCQQYHDFPITFGQGTRLEIKRAA

SEQ ID NO: 287 - DNA, 756 bp, Artificial sequence
  CDS (1)..(756): SC03-058
gccatggccgaggtccagctggtacagtctggaggaggcttggtccagcctggggggtccctcaaactctcctgtgcagcctctggattcaccttcagtagttatgctatgcactgggtccgccaggctccagggaagggactggaatatgtttcaggtattagtagtaatgggggtagcacatattatgcaaactctgtgaagggcagattcaccatctccagagacaattccaagaacacgctgtatcttcaaatgggcagcctgagagctgaggacatggctgtgtattactgtgcgagaactactaatcgggcttttgatatctggggccaagggacaatggtcaccgtctcgagcggtacgggcggttcaggcggaaccggcagcggcactggcgggtcgacggacatccagatgacccagtctccagactccctggctgtgtctctgggcgagagggccaccatcaactgcaagtccagccagagtgttttatacagctccaacaataagaactacttagcttggtaccagcagaaaccaggacagcctcctaagctgctcatttactgggcatctacccgggaatccggggtccctgaccgattcagtggcagcgggtctgggacagattttactctcaccatcagcagtctgcaggctgaagatgtggcagtttattactgtcagcaatattatagtactcctctgacgttcggccaagggaccaaggtggaaatcaaacgtgcggcc

SEQ ID NO: 288 - protein, 252 aa, Artificial sequence
  SC03-058
AMAEVQLVQSGGGLVQPGGSLKLSCAASGFTFSSYAMHWVRQAPGKGLEYVSGISSNGGSTYYANSVKGRFTISRDNSKNTLYLQMGSLRAEDMAVYYCARTTNRAFDIWGQGTMVTVSSGTGGSGGTGSGTGGSTDIQMTQSPDSLAVSLGERATINCKSSQSVLYSSNNKNYLAWYQQKPGQPPKLLIYWASTRESGVPDRFSGSGSGTDFTLTISSLQAEDVAVYYCQQYYSTPLTFGQGTKVEIKRAA

SEQ ID NO: 289 - DNA, 756 bp, Artificial sequence
  CDS (1)..(756): SC03-059
gccatggcccaggtgcagctggtgcaatctggggctgaggtgaagaagcctgggtcctcggtgaaggtctcctgcagggcttctggtggaggcgtcttccgcaattatgctatcaactgggtgcgacaggcccctggacaagggcttgagtggatgggaatgatcaaccctagtggtggtagcacaagctacgcacagaagttccagggcagagtcaccctgaccagggacacgtccacgagcacagtctacatggagctgagcagcctgagatctgaggacacggccgtgtattactgtgcgagattccctggtggtaccagaagccgcggctacatggacgtctggggcaaagggaccacggtcaccgtctcgagcggtacgggcggttcaggcggaaccggcagcggcactggcgggtcgacggaaattgtgctcacacagtctccagccaccctgtctttgtctccaggggaaagagccaccctctcctgcagggccagtcagagtgttagcagctacttagcctggtaccaacagaaacctggccaggctcccaggctcctcatctatgatgcatccaacagggccactggcatcccagccaggttcagtggcagtgggtctgggacagacttcactctcaccatcagcagcctagagcctgaagattttgcagtttattactgtcagcagcgtagcaactggcctccggctttcggcggagggaccaaggtggagatcaaacgtgcggcc

SEQ ID NO: 290 - protein, 252 aa, Artificial sequence
  SC03-059
AMAQVQLVQSGAEVKKPGSSVKVSCRASGGGVFRNYAINWVRQAPGQGLEWMGMINPSGGSTSYAQKFQGRVTLTRDTSTSTVYMELSSLRSEDTAVYYCARFPGGTRSRGYMDVWGKGTTVTVSSGTGGSGGTGSGTGGSTEIVLTQSPATLSLSPGERATLSCRASQSVSSYLAWYQQKPGQAPRLLIYDASNRATGIPARFSGSGSGTDFTLTISSLEPEDFAVYYCQQRSNWPPAFGGGTKVEIKRAA

SEQ ID NO: 291 - protein, 13 aa, Artificial sequence
  HCDR3 of SC03-019 and SC03-059
FPGGTRSRGYMDV

SEQ ID NO: 292 - protein, 10 aa, Artificial sequence
  HCDR3 of SC03-020, SC03-021, SC03-022, SC03-033, SC03-034, SC03-0 35, SC03-036, SC03-051. SC03-052 and SC03-056
GSGISTPMDV

SEQ ID NO: 293 - protein, 20 aa, Artificial sequence
  HCDR3 of SC03-023 and SC03-055
RVEVVEYQLLRPRYKSWFDP

SEQ ID NO: 294 - protein, 10 aa, Artificial sequence
  HCDR3 of SC03-024
KSAGSNAFDI

SEQ ID NO: 295 - protein, 8 aa, Artificial sequence
  HCDR3 of SC03-025, SC03-026, SC03-027, SC03-029, SC03-030, SC03-0 40, SC03-050, SC03-054 and SC03-058
TTNRAFDI

SEQ ID NO: 296 - protein, 12 aa, Artificial sequence
  HCDR3 of SC03-031
ESGGGYDNHFDY

SEQ ID NO: 297 - protein, 16 aa, Artificial sequence
  HCDR3 of SC03-032
DGWDLTGSFLGYGMDV

SEQ ID NO: 298 - protein, 10 aa, Artificial sequence
  HCDR3 of SC03-037 and SC03-038
DAHRGFGMDV

SEQ ID NO: 299 - protein, 12 aa, Artificial sequence
  HCDR3 of SC03-039
GSKWNDVGGGDY

SEQ ID NO: 300 - protein, 13 aa, Artificial sequence
  HCDR3 of SC03-053
GTGYLRSYHGMDV

SEQ ID NO: 301 - protein, 17 aa, Artificial sequence
  HCDR3 of SC03-057
PDIVVAGHSPPHYTMDV

SEQ ID NO: 302 - DNA, 372 bp, Artificial sequence
  CDS (1)..(372): Variable heavy chain of SC03-019
atggcccagatgcagctggtgcagtctgggggaggcgtggtccagcctgggaggtccctgagactctcctgtgcagcctctggattcaccttcagtggctatgctatgcactgggtccgccaggctccaggcaaggggctggagtgggtggcagttatatcatatgatggaagcaataaatactacgcagactccgtgaagggccgattcgccatctccagagacaattccaagaacacgctgtatctgcaaatgaacagcctgagagctgaggacacggctgtgtattactgtgcgagattccctggtggtaccagaagccgcggctacatggacgtctggggcaaagggaccacggtcaccgtctcgagc

SEQ ID NO: 303 - protein, 124 aa, Artificial sequence
  Variable heavy chain of SC03-019
MAQMQLVQSGGGVVQPGRSLRLSCAASGFTFSGYAMHWVRQAPGKGLEWVAVISYDGSNKYYADSVKGRFAISRDNSKNTLYLQMNSLRAEDTAVYYCARFPGGTRSRGYMDVWGKGTTVTVSS

SEQ ID NO: 304 - DNA, 330 bp, Artificial sequence
  CDS (1)..(330): Variable light chain of SC03-019
gaaattgtgctcacacagtctccagccaccctgtctttgtctccaggggaaagagccaccctctcctgcagggccagtcagagtgttagcagctacttagcctggtaccaacagaaacctggccaggctcccaggctcctcatctatgatgcatccaacagggccactggcatcccagccaggttcagtggcagtgggtctgggacagacttcactctcaccatcagcagcctagagcctgaagattttgcagtttattactgtcagcagcgtagcaactggcctccggctttcggcggagggaccaaggtggagatcaaacgtgcggcc

SEQ ID NO: 305 - protein, 110 aa, Artificial sequence
  Variable light chain of SC03-019
EIVLTQSPATLSLSPGERATLSCRASQSVSSYLAWYQQKPGQAPRLLIYDASNRATGIPARFSGSGSGTDFTLTISSLEPEDFAVYYCQQRSNWPPAFGGGTKVEIKRAA

SEQ ID NO: 306 - DNA, 363 bp, Artificial sequence
  CDS (1)..(363): Variable heavy chain of SC03-020
atggccgaagtgcagctggtgcagtctgggtcagaggtgaaaaagccgggggagtctctgaagatctcttgtaagggttctggatacggctttatcacctactggatcggctgggtgcgccagatgcccgggaaaggcctggagtggatggggatcatctatcctggtgactctgaaaccagatacagcccgtccttccaaggccaggtcaccatctcagccgacaagtccatcaacaccgcctacctgcagtggagcagcctgaaggcctcggacaccgccatatattactgtgcggggggttcggggatttctacccctatggacgtctggggccaagggaccacggtcaccgtctcgagc

SEQ ID NO: 307 - protein, 121 aa, Artificial sequence
  Variable heavy chain of SC03-020
MAEVQLVQSGSEVKKPGESLKISCKGSGYGFITYWIGWVRQMPGKGLEWMGIIYPGDSETRYSPSFQGQVTISADKSINTAYLQWSSLKASDTAIYYCAGGSGISTPMDVWGQGTTVTVSS

SEQ ID NO: 308 - DNA, 348 bp, Artificial sequence
  CDS (1)..(348): Variable light chain of SC03-020
gacatccagatgacccagtctccagactccctggctgtgtctctgggcgagagggccaccatcaactgcaagtccagccagaaaattttacacagctccaacaataagaactacttagcttggtaccagcagaaaccaggacagcctcctaagctgctcatttactgggcatctacccgggaatccggggtccctgaccgattcagtggcagcgggtctgggacagatttcactctcaccatcagcagcctgcaggctgaagatgtggcagtttattactgtcagcaatattatagtactcctccggttttcggcggagggaccaaggtggaaatcaaacgtgcggcc

SEQ ID NO: 309 - protein, 116 aa, Artificial sequence
  Variable light chain of SC03-020
DIQMTQSPDSLAVSLGERATINCKSSQKILHSSNNKNYLAWYQQKPGQPPKLLIYWASTRESGVPDRFSGSGSGTDFTLTISSLQAEDVAVYYCQQYYSTPPVFGGGTKVEIKRAA

SEQ ID NO: 310 - DNA, 363 bp, Artificial sequence
  CDS (1)..(363): Variable heavy chain of SC03-021
atggcccaggtccagctggtacagtctggaacagaggtgaaaaagccgggggagtctctgaagatctcctgtaagggttctggatacggctttatcacctactggatcggctgggtgcgccagatgcccgggaaaggcctggagtggatggggatcatctatcctggtgactctgaaaccagatacagcccgtccttccaaggccaggtcaccatctcagccgacaagtccatcaacaccgcctacctgcagtggagcagcctgaaggcctcggacaccgccatatattactgtgcggggggttcggggatttctacccctatggacgtctggggccaagggaccacggtcaccgtctcgagc

SEQ ID NO: 311 - protein, 121 aa, Artificial sequence
  Variable heavy chain of SC03-021
MAQVQLVQSGTEVKKPGESLKISCKGSGYGFITYWIGWVRQMPGKGLEWMGIIYPGDSETRYSPSFQGQVTISADKSINTAYLQWSSLKASDTAIYYCAGGSGISTPMDVWGQGTTVTVSS

SEQ ID NO: 312 - DNA, 348 bp, Artificial sequence
  CDS (1)..(348): Variable light chain of SC03-021
gatgttgtgatgactcagtctccagactccctggctgtgtctctgggcgagagggccaccatcaactgcaagtccagccagagtgttttacacagctccaacaataagaactacctagcttggtaccagcagaaaccaggacagcctcctaagctgctcatttactgggcatctacccggcaatccggggtccctgaccgattcagtggcagcgggtctgggacagatttcactctcaccatcagcagcctgcaggctgaagatgtggcagtttattactgtcagcaatattatagtactcctccgacgttcggccaagggaccaaggtggaaatcaaacgtgcggcc

SEQ ID NO: 313 - protein, 116 aa, Artificial sequence
  Variable light chain of SC03-021
DVVMTQSPDSLAVSLGERATINCKSSQSVLHSSNNKNYLAWYQQKPGQPPKLLIYWASTRQSGVPDRFSGSGSGTDFTLTISSLQAEDVAVYYCQQYYSTPPTFGQGTKVEIKRAA

SEQ ID NO: 314 - DNA, 363 bp, Artificial sequence
  CDS (1)..(363): Variable heavy chain of SC03-022
atggcccagatgcagctggtgcaatctggaacagaggtgaaaaagccgggggagtctctgaagatctcctgtaagggttctggatacggctttatcacctactggatcggctgggtgcgccagatgcccgggaaaggcctggagtggatggggatcatctatcctggtgactctgaaaccagatacagcccgtccttccaaggccaggtcaccatctcagccgacaagtccatcaacaccgcctacctgcagtggagcagcctgaaggcctcggacaccgccatatattactgtgcggggggttcggggatttctacccctatggacgtctggggccaagggaccacggtcaccgtctcgagc

SEQ ID NO: 315 - protein, 121 aa, Artificial sequence
  Variable heavy chain of SC03-022
MAQMQLVQSGTEVKKPGESLKISCKGSGYGFITYWIGWVRQMPGKGLEWMGIIYPGDSETRYSPSFQGQVTISADKSINTAYLQWSSLKASDTAIYYCAGGSGISTPMDVWGQGTTVTVSS

SEQ ID NO: 316 - DNA, 348 bp, Artificial sequence
  CDS (1)..(348): Variable light chain of SC03-022
gacatccagttgacccagtctccagactccctggctgtgtctctgggcgagagggccaccatcaactgcaagtccagccagagtgttttatacagctccatcaataagaactacttagcttggtaccagcagaaaccaggacagcctcctaagctgctcatttactgggcatctacccgggaatccggggtccctgaccgattcagtggcagcgggtctgggacagatttcactctcaccatcagcagcctgcaggctgaagatgtggcagtttattactgtcagcaatattatagtactccgtacacttttggccaggggaccaaggtggaaatcaaacgtgcggcc

SEQ ID NO: 317 - protein, 116 aa, Artificial sequence
  Variable light chain of SC03-022
DIQLTQSPDSLAVSLGERATINCKSSQSVLYSSINKNYLAWYQQKPGQPPKLLIYWASTRESGVPDRFSGSGSGTDFTLTISSLQAEDVAVYYCQQYYSTPYTFGQGTKVEIKRAA

SEQ ID NO: 318 - DNA, 390 bp, Artificial sequence
  CDS (1)..(390): Variable heavy chain of SC03-023
atggcccaggtgcagctacagcagtggggcgcaggactgttgaagccttcggagaccctgtccctcacctgcgctgtctatggtgggtctttcagtggtttctactggagctggatccgccagcccccagggaaggggctggagtggattggggaaatcaatcatagtggaagcaccaactacaacccgtccctcaagagtcgagtcaccatatcagtagacacgtccaagaaccagttctccctgaagctgagctctgtgaccgccgcggacacggctgtgtattactgtgcgagaagggtggaggtagtagagtaccagctgctccgtccccgatataaaagttggttcgacccctggggccagggcaccctggtcaccgtctcgagc

SEQ ID NO: 319 - protein, 130 aa, Artificial sequence
  Variable heavy chain of SC03-023
MAQVQLQQWGAGLLKPSETLSLTCAVYGGSFSGFYWSWIRQPPGKGLEWIGEINHSGSTNYNPSLKSRVTISVDTSKNQFSLKLSSVTAADTAVYYCARRVEVVEYQLLRPRYKSWFDPWGQGTLVTVSS

SEQ ID NO: 320 - DNA, 339 bp, Artificial sequence
  CDS (1)..(339): Variable light chain of SC03-023
cagtctgccctgactcagcctcgctcagtgtccgggtctcctggacagtcagtcaccatctcctgcactggatccagcagtactgttggtggttataactatgtctcctggtaccaacagcacccaggcaaagcccccaaactcatgatttatgatgtcagtaagcggccctcaggggtttctaatcgcttctctggctccaagtctggcaacacggcctccctgaccatctctgggctccaggctgaggacgaggctgattattactgcagctcatatacaagcagcagcacttatgtcttcggaactgggaccaaggtcaccgtcctaggtgcggcc

SEQ ID NO: 321 - protein, 113 aa, Artificial sequence
  Variable light chain of SC03-023
QSALTQPRSVSGSPGQSVTISCTGSSSTVGGYNYVSWYQQHPGKAPKLMIYDVSKRPSGVSNRFSGSKSGNTASLTISGLQAEDEADYYCSSYTSSSTYVFGTGTKVTVLGAA

SEQ ID NO: 322 - DNA, 363 bp, Artificial sequence
  CDS (1)..(363): Variable heavy chain of SC03-024
atggcccaggtgcagctggtggagtctgggtctgagttgaagatccctggggcctcagtgaaggtttcctgcaaggctactggatacaccttcactcgttattctctgaattgggtgcggcaggcccctggacaagggcttgagtgggtggggtggattaacacccagactggaaactcaaactatggccaggccttctcaggacggtttgtcttctccttggacacctcagtcagcacggcatatttgcaaatcagcagcctacaggccgaggacactgccacatactactgtgcgaggaagagtgcgggttcgaatgctttcgacatttggggccaagggacaatggtcaccgtctcgagc

SEQ ID NO: 323 - protein, 121 aa, Artificial sequence
  Variable heavy chain of SC03-024
MAQVQLVESGSELKIPGASVKVSCKATGYTFTRYSLNWVRQAPGQGLEWVGWINTQTGNSNYGQAFSGRFVFSLDTSVSTAYLQISSLQAEDTATYYCARKSAGSNAFDIWGQGTMVTVSS

SEQ ID NO: 324 - DNA, 339 bp, Artificial sequence
  CDS (1)..(339): Variable light chain of SC03-024
cagtctgtcgtgacgcagccgccctcagtgtctgcggccccaggacagaaggccaccatctcctgctctggaagcagctccaacattgggaataattatgtatcctggtaccagcagctcccaggaacagcccccaaactcctcatttatgacaataataagcgaccctcagggattcctaaccgattctctggctccaagtctggcacgtcagccaccctgggcatcaccggactccagactggggacgaggccgattattactgcggaacatgggatagcagcctgagtgcttatgtcttcggaactgggaccaaggtcaccgtcctaggtgcggcc

SEQ ID NO: 325 - protein, 113 aa, Artificial sequence
  Variable light chain of SC03-024
QSVVTQPPSVSAAPGQKATISCSGSSSNIGNNYVSWYQQLPGTAPKLLIYDNNKRPSGIPNRFSGSKSGTSATLGITGLQTGDEADYYCGTWDSSLSAYVFGTGTKVTVLGAA

SEQ ID NO: 326 - DNA, 357 bp, Artificial sequence
  CDS (1)..(357): Variable heavy chain of SC03-025
atggccgaggtgcagctggtggagtctgggggaggcttggtccagcctggggggtccctgagactctcctgtgcagcctctggattcaccttcagtagttatgctatgcactgggtccgccaggctccagggaagggactggaatatgtttcaggtattagtagtaatgggggtagcacatattatgcaaactctgtgaagggcagattcaccatctccagagacaattccaagaacacgctgtatcttcaaatgggcagcctgagagctgaggacatggctgtgtattactgtgcgagaactactaatcgggcttttgatatctggggccaagggacaatggtcaccgtctcgagc

SEQ ID NO: 327 - protein, 119 aa, Artificial sequence
  Variable heavy chain of SC03-025
MAEVQLVESGGGLVQPGGSLRLSCAASGFTFSSYAMHWVRQAPGKGLEYVSGISSNGGSTYYANSVKGRFTISRDNSKNTLYLQMGSLRAEDMAVYYCARTTNRAFDIWGQGTMVTVSS

SEQ ID NO: 328 - DNA, 348 bp, Artificial sequence
  CDS (1)..(348): Variable light chain of SC03-025
gacatccagttgacccagtctccagactccctggctgtgtctctgggcgagagggccaccatcaactgcaagtccagccagagtgttttatacagctccaacaataagaactacttagcttggtaccagcagaaaccaggacagcctcctaagctgctcatttactgggcatctatccgggaatccggggtccctgaccgattcagtggcagcgggtctgggacagatttcactctcaccatcagcagcctgcaggctgaagatgtggcagtttattactgtcagcaatattataatattccgtatgctttcggccaggggaccaagctggagatcaaacgtgcggcc

SEQ ID NO: 329 - protein, 116 aa, Artificial sequence
  Variable light chain of SC03-025
DIQLTQSPDSLAVSLGERATINCKSSQSVLYSSNNKNYLAWYQQKPGQPPKLLIYWASIRESGVPDRFSGSGSGTDFTLTISSLQAEDVAVYYCQQYYNIPYAFGQGTKLEIKRAA

SEQ ID NO: 330 - DNA, 357 bp, Artificial sequence
  CDS (1)..(357): Variable heavy chain of SC03-026
atggcccaggtccagctggtacagtctgggggaggcttggtccagcctggggggtccctgagactctcctgtgcagcctctggattcaccttcagtagttatgccatgcactgggtccgccaggctccagggaagggactggaatatgtttcaggtattagtagtaatgggggtagcacatattatgcaaactctgtgaagggcagattcaccatctccagagacaattccaagaacacgctgtatcttcaaatgggcagcctgagagctgaggacatggctgtgtattactgtgcgagaactactaatcgggcttttgatatctggggccaagggacaatggtcaccgtctcgagc

SEQ ID NO: 331 - protein, 119 aa, Artificial sequence
  Variable heavy chain of SC03-026
MAQVQLVQSGGGLVQPGGSLRLSCAASGFTFSSYAMHWVRQAPGKGLEYVSGISSNGGSTYYANSVKGRFTISRDNSKNTLYLQMGSLRAEDMAVYYCARTTNRAFDIWGQGTMVTVSS

SEQ ID NO: 332 - DNA, 348 bp, Artificial sequence
  CDS (1)..(348): Variable light chain of SC03-026
gacatccagatgacccagtctccagactccctggctgtgtctctgggcgagagggccaccatcaactgcaagtccagccagagtattttatacagctccaacagtaagaactacttaggttggtaccagcagaaaccaggacagcctcctaagctgctcatttactgggcatctacccgggaatccggggtccctgaccgattcagtggcagcgggtctgggacagatttcactctcaccatcagcagcctgcaggctgaagatgtggcagtttattactgtcagcaatattatagtactccgtacagttttggccaggggaccaaggtggagatcaaacgtgcggcc

SEQ ID NO: 333 - protein, 116 aa, Artificial sequence
  Variable light chain of SC03-026
DIQMTQSPDSLAVSLGERATINCKSSQSILYSSNSKNYLGWYQQKPGQPPKLLIYWASTRESGVPDRFSGSGSGTDFTLTISSLQAEDVAVYYCQQYYSTPYSFGQGTKVEIKRAA

SEQ ID NO: 334 - DNA, 357 bp, Artificial sequence
  CDS (1)..(357): Variable heavy chain of SC03-027
atggcccaggtccagctggtgcagtctgggggaggcttggtccagcctggggggtccctgagactctcctgtgcagcctctggattcaccttcagtagttatgctatgcactgggtccgccaggctccagggaagggactggaatatgtttcaggtattagtagtaatgggggtagcacatattatgcaaactctgtgaagggcagattcaccatctccagagacaattccaagaacacgctgtatcttcaaatgggcagcctgagagctgaggacatggctgtgtattactgtgcgagaactactaatcgggcttttgatatctggggccaagggacaatggtcaccgtctcgagc

SEQ ID NO: 335 - protein, 119 aa, Artificial sequence; identical to SEQ ID NO: 331
  Variable heavy chain of SC03-027

SEQ ID NO: 336 - DNA, 348 bp, Artificial sequence
  CDS (1)..(348): Variable light chain of SC03-027
gacatccagatgacccagtctccagactccctggctgtgtctctgggcgagagggccaccatcaactgcaagtccagccagagtgttttatacagctccaacaataagaactacttagcttggtaccagcagaaaccaggacagcctcctaagctgctcatttactgggcatctacccgggaatccggggtccctgaccgattcagtggcagcgggtctgggacagatttcactctcaccatcagcagcctgcaggctgaagatgtggcagtttattactgtcagcaatattatagtactccgtacagttttggccaggggaccaaagtggatatcaaacgtgcggcc

SEQ ID NO: 337 - protein, 116 aa, Artificial sequence
  Variable light chain of SC03-027
DIQMTQSPDSLAVSLGERATINCKSSQSVLYSSNNKNYLAWYQQKPGQPPKLLIYWASTRESGVPDRFSGSGSGTDFTLTISSLQAEDVAVYYCQQYYSTPYSFGQGTKVDIKRAA

SEQ ID NO: 338 - DNA, 357 bp, Artificial sequence
  CDS (1)..(357): Variable heavy chain of SC03-029
atggccgaagtgcagctggtgcagtctgggggaggcttggttcagccgggggggtccctgagactctcctgtgcagcctctggattcaccttcagtagttatgctatgcactgggtccgccaggctccagggaagggactggaatatgtttcaggtattagtagtaatgggggtagcacatattatgcaaactctgtgaagggcagattcaccatctccagagacaattccaagaacacgctgtatcttcaaatgggcagcctgagagctgaggacatggctgtgtattactgtgcgagaactactaatcgggcttttgatatctggggccaagggacaatggtcaccgtctcgagc

SEQ ID NO: 339 - protein, 119 aa, Artificial sequence
  Variable heavy chain of SC03-029
MAEVQLVQSGGGLVQPGGSLRLSCAASGFTFSSYAMHWVRQAPGKGLEYVSGISSNGGSTYYANSVKGRFTISRDNSKNTLYLQMGSLRAEDMAVYYCARTTNRAFDIWGQGTMVTVSS

SEQ ID NO: 340 - DNA, 348 bp, Artificial sequence
  CDS (1)..(348): Variable light chain of SC03-029
gacatccagatgacccagtctccagactccctggctgtgtctctgggcgagagggccaccatcaactgcaagtccagccagagtgttttatacagctccaacaataagaactacttagcttggtaccagcagaaaccaggacagcctcctaagctgctcatttactgggcatctacccgggaatccggggtccctgaccgattcagtggcagcgggtctgggacagatttcactctcaccatcagcagcctgcaggctgaagatgtggcagtttattactgtcagcaatattatagtactcctctcactttcggcgcagggaccaagctggagatcaaacgtgcggcc

SEQ ID NO: 341 - protein, 116 aa, Artificial sequence
  Variable light chain of SC03-029
DIQMTQSPDSLAVSLGERATINCKSSQSVLYSSNNKNYLAWYQQKPGQPPKLLIYWASTRESGVPDRFSGSGSGTDFTLTISSLQAEDVAVYYCQQYYSTPLTFGAGTKLEIKRAA

SEQ ID NO: 342 - DNA, 357 bp, Artificial sequence
  CDS (1)..(357): Variable heavy chain of SC03-030
atggcggaggtccaggtggtacagtctggaggaggcttggtccagcctggggggtccctcaaactctcctgtgcagcctctggattcaccttcagtagttatgctatgcactgggtccgccaggctccagggaagggactggaatatgtttcaggtattagtagtaatgggggtagcacatattatgcaaactctgtgaagggcagattcaccatctccagagacaattccaagaacacgctgtatcttcaaatgggcagcctgagagctgaggacatggctgtgtattactgtgcgagaactactaatcgggcttttgatatctggggccaagggacaatggtcaccgtctcgagc

SEQ ID NO: 343 - protein, 119 aa, Artificial sequence
  Variable heavy chain of SC03-030
MAEVQVVQSGGGLVQPGGSLKLSCAASGFTFSSYAMHWVRQAPGKGLEYVSGISSNGGSTYYANSVKGRFTISRDNSKNTLYLQMGSLRAEDMAVYYCARTTNRAFDIWGQGTMVTVSS

SEQ ID NO: 344 - DNA, 348 bp, Artificial sequence
  CDS (1)..(348): Variable light chain of SC03-030
gacatccagatgacccagtctccagactccctggctgtgtctctgggcgagagggccaccatcaactgcaagtccagccagagtgttttatacagctccaacaataagaactacttagcttggtaccagcagaaaccaggacagcctcctaagctgctcatttactgggcatctacccgggaatccggggtccctgaccgattcagtggcagcgggtctgggacagattttactctcaccatcagcagtctgcaggctgaagatgtggcagtttattactgtcagcaatattatagtactcctctgacgttcggccaagggaccaaggtggaaatcaaacgtgcggcc

SEQ ID NO: 345 - protein, 116 aa, Artificial sequence
  Variable light chain of SC03-030
DIQMTQSPDSLAVSLGERATINCKSSQSVLYSSNNKNYLAWYQQKPGQPPKLLIYWASTRESGVPDRFSGSGSGTDFTLTISSLQAEDVAVYYCQQYYSTPLTFGQGTKVEIKRAA

SEQ ID NO: 346 - DNA, 369 bp, Artificial sequence
  CDS (1)..(369): Variable heavy chain of SC03-031
atggcccaggtgcagctggtgcaatctggggctgacgtgaagaagcctgggtcctcggtgaaggtctcctgcgaggcttctggaggcacgttcagcagctatgctatcagctgggtgcgacaggcccctggacaagggcttgagtggatgggaaggatcatccctatccttggtataacaaactacgcacagaagttccagggcagagtcacaattaccgcggacaaatccacgggcacaggcaacatggagctgagcagcctgagatctgaggacacggccgtgtattactgtgcgagagaatcgggtggtggctacgataaccactttgactactggggccagggaaccctggtcaccgtctcgagc

SEQ ID NO: 347 - protein, 123 aa, Artificial sequence
  Variable heavy chain of SC03-031
MAQVQLVQSGADVKKPGSSVKVSCEASGGTFSSYAISWVRQAPGQGLEWMGRIIPILGITNYAQKFQGRVTITADKSTGTGNMELSSLRSEDTAVYYCARESGGGYDNHFDYWGQGTLVTVSS

SEQ ID NO: 348 - DNA, 339 bp, Artificial sequence
  CDS (1)..(339): Variable light chain of SC03-031
cagtctgtgctgacgcagccgccctcagcgtctgggacccccggacagagggtcaccatctcttgttctggaggcagctccaacatcggaagtaatactgtaaactggtaccagcaactcccaggaacggcccccaaactcgtcatctatgctaataatcagcggccctcaggggtccctgaccgattctctgcctccaagtctggcacctcagcctccctggccatcagtgggctccagtctgaggatgaggctgattattactgtgcagcttgggatgacagcctgactggtggagtgttcggcggagggacccagctcaccgttttaagtgcggcc

SEQ ID NO: 349 - protein, 113 aa, Artificial sequence
  Variable light chain of SC03-031
QSVLTQPPSASGTPGQRVTISCSGGSSNIGSNTVNWYQQLPGTAPKLVIYANNQRPSGVPDRFSASKSGTSASLAISGLQSEDEADYYCAAWDDSLTGGVFGGGTQLTVLSAA

SEQ ID NO: 350 - DNA, 381 bp, Artificial sequence
  CDS (1)..(381): Variable heavy chain of SC03-032
atggccgaggtgcagctggtggagtctggggctgaggtgaagaagcctgggtcctcggtgaaggtctcctgcaaggcttctggaggcaccttcagcagctatgctatcagctgggtgcgacaggcccctggacaagggcttgagtggatgggaaagatcatccctattcttggtaaagtcacttacgcacagaagttccaggccagagtcacgattaccgcggacgaatccacgagcacagcctacctggagctgagcagcctgagatctgaggacacggccgttttttactgtgcgagagacggctgggatttgactggttcttttttaggctacggtatggacgtctggggccaagggaccacggtcaccgtctcgagc

SEQ ID NO: 351 - protein, 127 aa, Artificial sequence
  Variable heavy chain of SC03-032
MAEVQLVESGAEVKKPGSSVKVSCKASGGTFSSYAISWVRQAPGQGLEWMGKIIPILGKVTYAQKFQARVTITADESTSTAYLELSSLRSEDTAVFYCARDGWDLTGSFLGYGMDVWGQGTTVTVSS

SEQ ID NO: 352 - DNA, 339 bp, Artificial sequence
  CDS (1)..(339): Variable light chain of SC03-032
cagtctgtcgtgacgcagccgccctcagcgtctgggacccccgggcagagggtcaccatctcttgttctggaagcagctccaacatcggaagtaatactgtaagctggtaccagcaggttccagggacggcccccaagctcctcatctataggaataatcagcggcccccaggggtccytgaccgattctctggctccaagtctggcacctcagcctccytggccatcagtgggctccagtctgacgatgaggccttttattactgtgcagcatgggatggcagcmtgaatggtctggccttcggcggagggaccaagctgaccgtcctaggtgcggcc

SEQ ID NO: 353 - protein, 113 aa, Artificial sequence
  misc_feature (60)..(60): The 'Xaa' at location 60 stands for Pro, or Leu.
  misc_feature (74)..(74): The 'Xaa' at location 74 stands for Leu.
  misc_feature (96)..(96): The 'Xaa' at location 96 stands for Met, or Leu.
  Variable light chain of SC03-032
QSVVTQPPSASGTPGQRVTISCSGSSSNIGSNTVSWYQQVPGTAPKLLIYRNNQRPPGVXDRFSGSKSGTSASXAISGLQSDDEAFYYCAAWDGSXNGLAFGGGTKLTVLGAA

SEQ ID NO: 354 - DNA, 363 bp, Artificial sequence; identical to SEQ ID NO: 310
  CDS (1)..(363): Variable heavy chain of SC03-033

SEQ ID NO: 355 - protein, 121 aa, Artificial sequence; identical to SEQ ID NO: 311
  Variable heavy chain of SC03-033

SEQ ID NO: 356 - DNA, 351 bp, Artificial sequence
  CDS (1)..(351): Variable light chain of SC03-033
gatgttgtgatgactcagtctccagactccctggctgtgtctctgggcgagagggccaccatcaactgcaagaccagccacaatattttctccagatccaacaataaggactacttagcttggtaccagcagaaaccaggccagcctcccagattactcatttactgggcgtctacccgggcatccggggtccctgaacgattcagtggcagcggctctgggacagacttcagtctcaccatcagcagcctgcaggctgaagatgtggcggtttattactgtcagcaatattatagttcccctatgtacagttttggccaggggaccaaggtggagatcaaacgtgcggcc

SEQ ID NO: 357 - protein, 117 aa, Artificial sequence
  Variable light chain of SC03-033
DVVMTQSPDSLAVSLGERATINCKTSHNIFSRSNNKDYLAWYQQKPGQPPRLLIYWASTRASGVPERFSGSGSGTDFSLTISSLQAEDVAVYYCQQYYSSPMYSFGQGTKVEIKRAA

SEQ ID NO: 358 - DNA, 363 bp, Artificial sequence
  CDS (1)..(363): Variable heavy chain of SC03-034
atggccgaggtgcagctggtgcagtctggagcagaggtgaaaaagccgggggagtctctgaagatctcctgtaagggttctggatacggctttatcacctactggatcggctgggtgcgccagatgcccgggaaaggcctggagtggatggggatcatctatcctggtgactctgaaaccagatacagcccgtccttccaaggccaggtcaccatctcagccgacaagtccatcaacaccgcctacctgcagtggagcagcctgaaggcctcggacaccgccatatattactgtgcggggggttcggggatttctacccctatggacgtctggggccaagggaccacggtcaccgtctcgagc

SEQ ID NO: 359 - protein, 121 aa, Artificial sequence
  Variable heavy chain of SC03-034
MAEVQLVQSGAEVKKPGESLKISCKGSGYGFITYWIGWVRQMPGKGLEWMGIIYPGDSETRYSPSFQGQVTISADKSINTAYLQWSSLKASDTAIYYCAGGSGISTPMDVWGQGTTVTVSS

SEQ ID NO: 360 - DNA, 348 bp, Artificial sequence
  CDS (1)..(348): Variable light chain of SC03-034
gatgttgtgatgactcagtctccagactccctggctgtgtctctgggcgagagggccaccatcaactgcaagtccagccagagtattttaaacagatccaacaataagaactacttagcttggtaccagcagaaaccaggacagcctcctaagctgctcatttactgggcatctacccgggaatccggggtccctgaccgattcagtggcagcgggtctgggacagatttcaatctcaccatcagcagcctgcaggctgaggatgtggcagtttattactgtcagcagtataataactggcctctcactttcggcggagggaccaaagtggatatcaaacgtgcggcc

SEQ ID NO: 361 - protein, 116 aa, Artificial sequence
  Variable light chain of SC03-034
DVVMTQSPDSLAVSLGERATINCKSSQSILNRSNNKNYLAWYQQKPGQPPKLLIYWASTRESGVPDRFSGSGSGTDFNLTISSLQAEDVAVYYCQQYNNWPLTFGGGTKVDIKRAA

SEQ ID NO: 362 - DNA, 363 bp, Artificial sequence
  CDS (1)..(363): Variable heavy chain of SC03-035
atggccgaggtgcagctggtgcagtctggagcagaggtgaaaaagcccggggagtctctgaagatctcctgtaagggttctggatacggctttatcacctactggatcggctgggtgcgccagatgcccgggaaaggcctggagtggatggggatcatctatcctggtgactctgaaaccagatacagcccgtccttccaaggccaggtcaccatctcagccgacaagtccatcaacaccgcctacctgcagtggagcagcctgaaggcctcggacaccgccatatattactgtgcggggggttcggggatttctacccctatggacgtctggggccaagggaccacggtcaccgtctcgagc

SEQ ID NO: 363 - protein, 121 aa, Artificial sequence; identical to SEQ ID NO: 359
  Variable heavy chain of SC03-035

SEQ ID NO: 364 - DNA, 351 bp, Artificial sequence
  CDS (1)..(351): Variable light chain of SC03-035
gacatccagatgacccagtctccagactccctggctgtgtctctgggcgagagggccaccatcaactgcaagtccagtcagagtgttttatacagctccaacaataagaactacttagcttggtaccagcagaaaccaggacagcctcctaagctgctcatttactgggcatctacccgggaatccggggtccctgaccgattcagtggcagcgggtctgggacagatttcactctcaccatcagcagcctgcaggctgaagatgtggcagtttattactgtcagcaatattatagtactcccctgtacagttttggccaggggaccaaggtggagatcaaacctgcggcc

SEQ ID NO: 365 - protein, 117 aa, Artificial sequence
  Variable light chain of SC03-035
DIQMTQSPDSLAVSLGERATINCKSSQSVLYSSNNKNYLAWYQQKPGQPPKLLIYWASTRESGVPDRFSGSGSGTDFTLTISSLQAEDVAVYYCQQYYSTPLYSFGQGTKVEIKPAA

SEQ ID NO: 366 - DNA, 363 bp, Artificial sequence
  CDS (1)..(363): Variable heavy chain of SC03-036
atggccgaggtgcagctggtgcagtctggaacagaggtgaaaaagccgggggagtctctgaagatctcctgtaagggttctggatacggctttatcacctactggatcggctgggtgcgccagatgcccgggaaaggcctggagtggatggggatcatctatcctggtgactctgaaaccagatacagcccgtccttccaaggccaggtcaccatctcagccgacaagtccatcaacaccgcctacctgcagtggagcagcctgaaggcctcggacaccgccatatattactgtgcggggggttcggggatttctacccctatggacgtctggggccaagggaccacggtcaccgtctcgagc

SEQ ID NO: 367 - protein, 121 aa, Artificial sequence
  Variable heavy chain of SC03-036
MAEVQLVQSGTEVKKPGESLKISCKGSGYGFITYWIGWVRQMPGKGLEWMGIIYPGDSETRYSPSFQGQVTISADKSINTAYLQWSSLKASDTAIYYCAGGSGISTPMDVWGQGTTVTVSS

SEQ ID NO: 368 - DNA, 345 bp, Artificial sequence
  CDS (1)..(345): Variable light chain of SC03-036
gacatccagatgacccagtctccagactccctggctgtgtctctgggcgagagggccaccatcaactgcaagtccagccagagtgttttacacagccccaacaataagaactacttggcttggtaccagcagaaaccaggacagcctcctaagctgctcatttactgggcatctacccgggaatccggggtccctgaccgattcagtggcagcgggtctgggacagatttcactctcaccatcagcagcctgcaggctgaagatgtggcagtttattactgtcagcaatattatagtactaacagttttggccaggggaccaagctggagatcaaacgtgcggcc

SEQ ID NO: 369 - protein, 115 aa, Artificial sequence
  Variable light chain of SC03-036
DIQMTQSPDSLAVSLGERATINCKSSQSVLHSPNNKNYLAWYQQKPGQPPKLLIYWASTRESGVPDRFSGSGSGTDFTLTISSLQAEDVAVYYCQQYYSTNSFGQGTKLEIKRAA

SEQ ID NO: 370 - DNA, 360 bp, Artificial sequence
  CDS (1)..(360): Variable heavy chain of SC03-037
atggccaaagtgcagctggtgcagtctggaggaggcttgatccagcctggggggtccctgagactctcctgtgcagcctctggattcaccgtcagtagcaactacatgagctgggtccgccaggctccagggaaggggctggagtgggtctcaattgtttttagcggtggtagcacatactacgcagactccgtgaagggccgattcaccatctccagagacaattccaagaacacgctgtatcttcaaatgaacagcctgagagccgaggacacggccgtatattattgtgcgagagatgcccaccgggggttcggtatggacgtctggggccaagggaccacggtcaccgtctcgagc

SEQ ID NO: 371 - protein, 120 aa, Artificial sequence
  Variable heavy chain of SC03-037
MAKVQLVQSGGGLIQPGGSLRLSCAASGFTVSSNYMSWVRQAPGKGLEWVSIVFSGGSTYYADSVKGRFTISRDNSKNTLYLQMNSLRAEDTAVYYCARDAHRGFGMDVWGQGTTVTVSS

SEQ ID NO: 372 - DNA, 333 bp, Artificial sequence
  CDS (1)..(333): Variable light chain of SC03-037
tcttctgagctgactcaggaccctgctgtgtctgtggccttgggacagacagtcaggatcacatgccaaggagacagcctcagaagctattatgcaagctggtaccagcagaagccaggacaggcccctgtacttgtcatctatggcaaaaacaaccggccctcagggatcccagaccggttctctggctccagctcaggaaacacagcttccttgaccatcactggggctcaggcggaagatgaggccgactattattgtaacggccgggacagcagtggtaaccattgggtgttcggcggagggaccaagctgaccgtcctaggtgcggcc

SEQ ID NO: 373 - protein, 111 aa, Artificial sequence
  Variable light chain of SC03-037
SSELTQDPAVSVALGQTVRITCQGDSLRSYYASWYQQKPGQAPVLVIYGKNNRPSGIPDRFSGSSSGNTASLTITGAQAEDEADYYCNGRDSSGNHWVFGGGTKLTVLGAA

SEQ ID NO: 374 - DNA, 360 bp, Artificial sequence
  CDS (1)..(360): Variable heavy chain of SC03-038
atggccgaggtgcagctggtgcagtctggaggaggcttgatccagcctggggggtccctgagactctcctgtgcagcctctgggttcaccgtcagtagcaactacatgagctgggtccgccaggctccagggaaggggctggagtgggtctcaattgtttttagcggtggtagcacatactacgcagactccgtgaagggccgattcaccatctccagagacaattccaagaacacgctgtatcttcaaatgaacagcctgagagccgaggacacggccgtatattattgtgcgagagatgcccatcgggggttcggtatggacgtctggggccaggggaccacggtcaccgtctcgagc

SEQ ID NO: 375 - protein, 120 aa, Artificial sequence
  Variable heavy chain of SC03-038
MAEVQLVQSGGGLIQPGGSLRLSCAASGFTVSSNYMSWVRQAPGKGLEWVSIVFSGGSTYYADSVKGRFTISRDNSKNTLYLQMNSLRAEDTAVYYCARDAHRGFGMDVWGQGTTVTVSS

SEQ ID NO: 376 - DNA, 333 bp, Artificial sequence
  CDS (1)..(333): Variable light chain of SC03-038
tcttctgagctgactcaggaccctgctgtgtctgtggccttgggacagacagtcaggatcacatgccaaggagacagcctcagaagctattatgcaagctggtaccagcagaagccaggacaggcccctgtacttgtcatctatggtaaaaacaaccggccctcagggatcccagaccgattctctggctccagctcaggagacacagcttccttgaccatcactggggctcaggcggaagatgaggctgactattactgtaactcccgggacagcagtggtaaccattgggtgttcggcggagggaccaagctgaccgtcctaggtgcggcc

SEQ ID NO: 377 - protein, 111 aa, Artificial sequence
  Variable light chain of SC03-038
SSELTQDPAVSVALGQTVRITCQGDSLRSYYASWYQQKPGQAPVLVIYGKNNRPSGIPDRFSGSSSGDTASLTITGAQAEDEADYYCNSRDSSGNHWVFGGGTKLTVLGAA

SEQ ID NO: 378 - DNA, 369 bp, Artificial sequence
  CDS (1)..(369): Variable heavy chain of SC03-039
atggccgaggtgcagctggtggagtctgggggaggcttggtacagcctggggggtccctgagactctcctgtgcagcctctggattcacctttagcagctatgccatgagctgggtccgccaggctccagggaaggggctggagtgggtctcagttatttatagcggtggtactagtacatactatgcagactccgtgaagggccggttcaccatctccagagataattccaagaacacactgtatctgcaaatgaacagcctgagagccgaggacacggccgtatatttctgtgcgaaaggatctaaatggaacgacgtgggggggggtgactactggggccagggaaccctggtcaccgtctcgagc

SEQ ID NO: 379 - protein, 123 aa, Artificial sequence
  Variable heavy chain of SC03-039
MAEVQLVESGGGLVQPGGSLRLSCAASGFTFSSYAMSWVRQAPGKGLEWVSVIYSGGTSTYYADSVKGRFTISRDNSKNTLYLQMNSLRAEDTAVYFCAKGSKWNDVGGGDYWGQGTLVTVSS

SEQ ID NO: 380 - DNA, 339 bp, Artificial sequence
  CDS (1)..(339): Variable light chain of SC03-039
aattttatgctgactcagccccactctgtgtcggagtctccggggaagacggtaaccatctcctgcgccggcagcagtggcagcattgccagcaactatgtgcagtggtaccagcaacgcccgggcagtgcccccactactgtgatctatgaggataaccaaagaccctctggggtccctgatcggttctctggctccatcgacagctcctccaactctgcctccctcaccatctctggactgaagactgaggacgaggctgactactactgtcagtcttatgatggttatctttggattttcggcggagggaccaagctgaccgtcctaggtgcggcc

SEQ ID NO: 381 - protein, 113 aa, Artificial sequence
  Variable light chain of SC03-039
NFMLTQPHSVSESPGKTVTISCAGSSGSIASNYVQWYQQRPGSAPTTVIYEDNQRPSGVPDRFSGSIDSSSNSASLTISGLKTEDEADYYCQSYDGYLWIFGGGTKLTVLGAA

SEQ ID NO: 382 - DNA, 357 bp, Artificial sequence
  CDS (1)..(357): Variable heavy chain of SC03-040
atggcccaggtccagctggtacagtctgggggaggcttggtccagcctggggggtccctgagactctcctgtgcagcctctggattcaccttcagtagttatgctatgcactgggtccgccaggctccagggaagggactggaatatgtttcaggtattagtagtaatgggggtagcacatattatgcaaactctgtgaagggcagattcaccatctccagagacaattccaagaacacgctgtatcttcaaatgggcagcctgagagctgaggacatggctgtgtattactgtgcgagaactactaatcgggcttttgatatctggggccaagggacaatggtcaccgtctcgagc

SEQ ID NO: 383 - protein, 119 aa, Artificial sequence; identical to SEQ ID NO: 331
  Variable heavy chain of SC03-040

SEQ ID NO: 384 - DNA, 348 bp, Artificial sequence
  CDS (1)..(348): Variable light chain of SC03-040
gacatccagatgacccagtctccagactccctggctgtgtctctgggcgagagggccaccatcaactgcaggtccagccagagtgttttatacagctccaacaataagaactacttagcttggtaccagcagaaaccaggacagcctcctaagctgctcatttactgggcatctacccgggaatccggggtccctgaccgattcagtggcagcgggtctgggacagatttcactctcaccatcagcagcctgcaggctgaagatgtggcagtttattactgtcagcaatattatagtagtccgtacagttttggccaggggaccaagctggagatcaaacgtgcggcc

SEQ ID NO: 385 - protein, 116 aa, Artificial sequence
  Variable light chain of SC03-040
DIQMTQSPDSLAVSLGERATINCRSSQSVLYSSNNKNYLAWYQQKPGQPPKLLIYWASTRESGVPDRFSGSGSGTDFTLTISSLQAEDVAVYYCQQYYSSPYSFGQGTKLEIKRAA

SEQ ID NO: 386 - DNA, 357 bp, Artificial sequence; identical to SEQ ID NO: 334
  CDS (1)..(357): Variable heavy chain of SC03-041

SEQ ID NO: 387 - protein, 119 aa, Artificial sequence; identical to SEQ ID NO: 331
  Variable heavy chain of SC03-041

SEQ ID NO: 388 - DNA, 348 bp, Artificial sequence
  CDS (1)..(348): Variable light chain of SC03-041
gatatccagatgacccagtctccagactccctggctgtgtctctgggcgagcggaccaccatcaactgcaagtccagccagagtgttttatacagctccaacaataagaactacttagcttggtaccagcagaaaccaggacagcctcctaagctgctcatttactgggcatctacccgggaatccggggtccctgaccgattcagtggcagcgggtctgggacagatttcactctcaccatcagcagcctgcaggctgaagatgtggcagtttattactgtcagcaatattatagtactccgtacagttttggccaggggaccaagctggagatcaaacgtgcggcc

SEQ ID NO: 389 - protein, 116 aa, Artificial sequence
  Variable light chain of SC03-041
DIQMTQSPDSLAVSLGERTTINCKSSQSVLYSSNNKNYLAWYQQKPGQPPKLLIYWASTRESGVPDRFSGSGSGTDFTLTISSLQAEDVAVYYCQQYYSTPYSFGQGTKLEIKRAA

SEQ ID NO: 390 - DNA, 357 bp, Artificial sequence
  misc_feature (150)..(151): n can be a, t, c, or g
  CDS (1)..(357): Variable heavy chain of SC03-042
atggcccagatgcagctggtgcaatctgggggaggcttagttcagcctggggggtccctgagactttcctgtgcagcctctggattcaccttcagtagttatgctatgcactgggtccgccaggctccagggaagggactggaatatgtntcaggtattagtagtaatgggggtagcacatattatgcaaactctgtgaagggcagattcaccatctccagagacaattccaagaacacgctgtatcttcaaatgggcagcctgagagctgaggacatggctgtgtattactgtgcgagaactactaatcgggcttttgatatctggggccaagggacaatggtcaccgtctcgagc

SEQ ID NO: 391 - protein, 119 aa, Artificial sequence
  Variable heavy chain of SC03-042
  misc_feature (150)..(151): n can be a, t, c, or g
MAQMQLVQSGGGLVQPGGSLRLSCAASGFTFSSYAMHWVRQAPGKGLEYVSGISSNGGSTYYANSVKGRFTISRDNSKNTLYLQMGSLRAEDMAVYYCARTTNRAFDIWGQGTMVTVSS

SEQ ID NO: 392 - DNA, 348 bp, Artificial sequence
  CDS (1)..(348): Variable light chain of SC03-042
gatgttgtgatgactcagtctccagactccctggctgtgtctctgggcgagagggccaccatcaactgcaagtccagccagagtgttttatacagctccaacgataagaactacttagcttggtaccagcagaaaccaggacagcctcctaagctgctcatttactgggcatctacccgggaatccggggtccctgaccgattcagcggcagcgggtctgggacagatttcactctcaccatcagcagcctgcaggctgaagatgtggcagtttattactgtcagcaatattatagtactccgtacagttttggccaggggaccaagctggagatcaaacgtgcggcc

SEQ ID NO: 393 - protein, 116 aa, Artificial sequence
  Variable light chain of SC03-042
DVVMTQSPDSLAVSLGERATINCKSSQSVLYSSNDKNYLAWYQQKPGQPPKLLIYWASTRESGVPDRFSGSGSGTDFTLTISSLQAEDVAVYYCQQYYSTPYSFGQGTKLEIKRAA

SEQ ID NO: 394 - DNA, 357 bp, Artificial sequence; identical to SEQ ID NO: 334
  CDS (1)..(357): Variable heavy chain of SC03-043

SEQ ID NO: 395 - protein, 119 aa, Artificial sequence; identical to SEQ ID NO: 331
  Variable heavy chain of SC03-043

SEQ ID NO: 396 - DNA, 348 bp, Artificial sequence
  CDS (1)..(348): Variable light chain of SC03-043
gacatccagttgacccagtctccagactccctggctgtgtctctgggcgagagggccaccatcaactgcaagtccagccagagtgttttatacaggtccaacaataagaactacttagcttggtaccagcagaagccaggacagcctcctaagctgctcatttactgggcatctacccgtgaatccggggtctctgagcgattcagtggcagcgggtctgggacagatttcactctcaccatcagcagcctgcaggctgaagatgtggcagtttattactgtcagcaatattatagtaccccgtacagttttggccaggggaccaagctggagatcaaacgtgcggcc

SEQ ID NO: 397 - protein, 116 aa, Artificial sequence
  Variable light chain of SC03-043
DIQLTQSPDSLAVSLGERATINCKSSQSVLYRSNNKNYLAWYQQKPGQPPKLLIYWASTRESGVSERFSGSGSGTDFTLTISSLQAEDVAVYYCQQYYSTPYSFGQGTKLEIKRAA

SEQ ID NO: 398 - DNA, 357 bp, Artificial sequence
  CDS (1)..(357): Variable heavy chain of SC03-044
atggccgaggtgcagctggtggagactgggggaggcttggtccagcctggggggtccctgagactctcctgtgcagcctctggattcaccttcagtagttatgctatgcactgggtccgccaggctccagggaagggactggaatatgtttcaggtattagtagtaatgggggtagcacatattatgcaaactctgtgaagggcagattcaccatctccagagacaattccaagaacacgctgtatcttcaaatgggcagcctgagagctgaggacatggctgtgtattactgtgcgagaactactaatcgggcttttgatatctggggccaagggacaatggtcaccgtctcgagc

SEQ ID NO: 399 - protein, 119 aa, Artificial sequence
  Variable heavy chain of SC03-044
MAEVQLVETGGGLVQPGGSLRLSCAASGFTFSSYAMHWVRQAPGKGLEYVSGISSNGGSTYYANSVKGRFTISRDNSKNTLYLQMGSLRAEDMAVYYCARTTNRAFDIWGQGTMVTVSS

SEQ ID NO: 400 - DNA, 348 bp, Artificial sequence
  CDS (1)..(348): Variable light chain of SC03-044
gacatccagatgacccagtctccagactccctggctgtgtctctgggcgagagggccaccatcaactgcaagtccagccagagtgttttatacagctccaacaataagaactacttagcttggtaccagcagaaaccaggacagcctcctaagctgctcatttactgggcatctacccgggaatccggggtccctgaccgattcaggggcagcgggtccgggacagatttcactctcaccatcagcagcctgcaggctgaagatctggcagtttattactgtcagcaatattatagtactccgtacagttttggccaggggaccaagctggagatcaaacgtgcggcc

SEQ ID NO: 401 - protein, 116 aa, Artificial sequence
  Variable light chain of SC03-044
DIQMTQSPDSLAVSLGERATINCKSSQSVLYSSNNKNYLAWYQQKPGQPPKLLIYWASTRESGVPDRFRGSGSGTDFTLTISSLQAEDLAVYYCQQYYSTPYSFGQGTKLEIKRAA

SEQ ID NO: 402 - DNA, 357 bp, Artificial sequence
  CDS (1)..(357): Variable heavy chain of SC03-045
atggcccagctgcagctgcaggagtcggggggaggcttggtccagcctggggggtccctgagactctcctgtgcagcctctggattcaccttcagtagttatgctatgcactgggtccgccaggctccagggaagggactggaatatgtttcaggtattagtagtaatgggggtagtacatattatgcaaactctgtgaagggcagattcaccatctccagagacaattccaagaacacgctgtatcttcaaatgggcagcctgagagctgaggacatggctgtgtattactgtgcgagaactactaatcgggcttttgatatctggggccaggggacaatggtcaccgtctcgagc

SEQ ID NO: 403 - protein, 119 aa, Artificial sequence
  Variable heavy chain of SC03-045
MAQLQLQESGGGLVQPGGSLRLSCAASGFTFSSYAMHWVRQAPGKGLEYVSGISSNGGSTYYANSVKGRFTISRDNSKNTLYLQMGSLRAEDMAVYYCARTTNRAFDIWGQGTMVTVSS

SEQ ID NO: 404 - DNA, 348 bp, Artificial sequence
  CDS (1)..(348): Variable light chain of SC03-045
gacatccagctgacccagtctccagactccctggctgtgtctctgggcgagagggccaccatcaactgcaagtccagccagagtgttttatacagctccaacaataagaactacttagcttggtaccagcagaaaccaggacagcctcctaagctgctcatttactgggcatctacccgggaatccggggtccctgaccgattcagtggcagcgggtctgggacagatttcactctcaccatcagcagcctgcaggctgaagatgtggcagtttattactgtcagcaatattatagtactccattcactttcggccctgggaccaaagtggatatcaaacgtgcggcc

SEQ ID NO: 405 - protein, 116 aa, Artificial sequence
  Variable light chain of SC03-045
DIQLTQSPDSLAVSLGERATINCKSSQSVLYSSNNKNYLAWYQQKPGQPPKLLIYWASTRESGVPDRFSGSGSGTDFTLTISSLQAEDVAVYYCQQYYSTPFTFGPGTKVDIKRAA

SEQ ID NO: 406 - DNA, 357 bp, Artificial sequence
  CDS (1)..(357): Variable heavy chain of SC03-046
atggccgaggtccagctggtacagtctgggggaggcttggtccagcctggggggtccctgagactctcctgtgcagcctctggattcaccttcagtagttatgctatgcactgggtccgccaggctccagggaagggactggaatatgtttcaggtattagtagtaatgggggtagcacatattatgcaaactctgtgaagggcagattcaccatctccagagacaattccaagaacacgctgtatcttcaaatgggcagcctgagagctgaggacatggctgtgtattactgtgcgagaactactaatcgggcttttgatatctggggccaagggacaatggtcaccgtctcgagc

SEQ ID NO: 407 - protein, 119 aa, Artificial sequence; identical to SEQ ID NO: 339
  Variable heavy chain of SC03-046

SEQ ID NO: 408 - DNA, 348 bp, Artificial sequence
  CDS (1)..(348): Variable light chain of SC03-046
gatgttgtgatgactcagtctccagactccctggctgtgtctctgggcgagagggccaccatcaactgcaagtccagccagagtgttttatacagctccaacaataagaactacttagcttggtaccagcagaaaccagggcagcctcctaagctgctcatttactgggcatctacccgggaatccggggtccctgacaggttcagtggcagcgggtctgggacagacttcagtctcaccatcagcagcctgcaggctgaagatgtggcggtttattactgtcagcaatattacagtcctccgtacacttttggcccggggaccaaggtggaaatcaaacgtgcggcc

SEQ ID NO: 409 - protein, 116 aa, Artificial sequence
  Variable light chain of SC03-046
DVVMTQSPDSLAVSLGERATINCKSSQSVLYSSNNKNYLAWYQQKPGQPPKLLIYWASTRESGVPDRFSGSGSGTDFSLTISSLQAEDVAVYYCQQYYSPPYTFGPGTKVEIKRAA

SEQ ID NO: 410 - DNA, 357 bp, Artificial sequence
  CDS (1)..(357): Variable heavy chain of SC03-047
atggccgaggtgcagctggtgcagtctgggggaggcttggtccagcctggggggtccctgagactctcctgtgcagcctctggattcaccttcagtagttatgctatgcactgggtccgccaggctccagggaagggactggaatatgtttcaggtattagtagtaatgggggtagcacatattatgcaaactctgtgaagggcagattcaccatctccagagacaattccaagaacacgctgtatcttcaaatgggcagcctgagagctgaggacatggctgtgtattactgtgcgagaactactaatcgggcttttgatatctggggccaggggacaatggtcaccgtctcgagc

SEQ ID NO: 411 - protein, 119 aa, Artificial sequence; identical to SEQ ID NO: 339
  Variable heavy chain of SC03-047

SEQ ID NO: 412 - DNA, 348 bp, Artificial sequence
  CDS (1)..(348): Variable light chain of SC03-047
gatgttgtgatgactcagtctccagactccctggctgtgtctctgggcgagagggccaccatcaactgcaagtccagccagagtgttttatatagctccaacaataagaactacttagcttggtaccagcagaaaccaggacagcctcctaagctgctcatttactgggcatctacccgggaatccggggtccctgaccgattcagtggcagcgggtctgggacagatttcactctcaccatcagcagcctgcaggctgaagatgtggcagtttattactgtcagcaatattatagtactcctctcactttcggcggagggaccaaggtggaaatcaaacgtgcggcc

SEQ ID NO: 413 - protein, 116 aa, Artificial sequence
  Variable light chain of SC03-047
DVVMTQSPDSLAVSLGERATINCKSSQSVLYSSNNKNYLAWYQQKPGQPPKLLIYWASTRESGVPDRFSGSGSGTDFTLTISSLQAEDVAVYYCQQYYSTPLTFGGGTKVEIKRAA

SEQ ID NO: 414 - DNA, 357 bp, Artificial sequence; identical to SEQ ID NO: 398
  CDS (1)..(357): Variable heavy chain of SC03-048

SEQ ID NO: 415 - protein, 119 aa, Artificial sequence; identical to SEQ ID NO: 399
  Variable heavy chain of SC03-048

SEQ ID NO: 416 - DNA, 348 bp, Artificial sequence
  CDS (1)..(348): Variable light chain of SC03-048
gacatccagttgacccagtctccagactccctggctgtgtctctgggcgagagggccaccatcaactgcaagtccagccagagtgttttatacagctccaacaataagaactacttagcttggtaccagcagaaaccaggacagcctcctaagctgctcatttactgggcatctacccgggaatccggggtccctgaccgattcagtggcagcgggtctgggacagatttcactctcaccatcagcagcctgcaggctgaagatgtggcagtttattactgtcagcaatattacagtactccgctcactttcggcggagggaccaaggtggaaatcaaacgtgcggcc

SEQ ID NO: 417 - protein, 116 aa, Artificial sequence
  Variable light chain of SC03-048
DIQLTQSPDSLAVSLGERATINCKSSQSVLYSSNNKNYLAWYQQKPGQPPKLLIYWASTRESGVPDRFSGSGSGTDFTLTISSLQAEDVAVYYCQQYYSTPLTFGGGTKVEIKRAA

SEQ ID NO: 418 - DNA, 357 bp, Artificial sequence
  CDS (1)..(357): Variable heavy chain of SC03-049
atggcccaggtgcagctggtgcagtctgggggaggcttggtccagcctggggggtccctgagactctcctgtgcagcctctggattcaccttcagtagttatgctatgcactgggtccgccaggctccagggaagggactggaatatgtttcaggtattagtagtaatgggggtagcacatattatgcaaactctgtgaagggcagattcaccatctccagagacaattccaagaacacgctgtatcttcaaatgggcagcctgagagctgaggacatggctgtgtattactgtgcgagaactactaatcgggcttttgacatctggggccaagggacaatggtcaccgtctcgagc

SEQ ID NO: 419 - protein, 119 aa, Artificial sequence; identical to SEQ ID NO: 331
  Variable heavy chain of SC03-049

SEQ ID NO: 420 - DNA, 348 bp, Artificial sequence
  CDS (1)..(348): Variable light chain of SC03-049
gacatccagttgacccagtctccatcctccctggctgtgtctctgggcgagagggccaccatcaactgcaagtccagccagagtgttttatacagctccaacaataagaactacttagcttggtatcagcagaaaccaggacagcctcctaagctgctcatttactgggcatctacccgggaatccggggtccctgaccgattcagtggcagcgggtctgggacagatttcactctcaccatcagcagcctgcaggctgaagatgtggcagtttattactgtcagcaatattatagtactccgctcactttcggcggagggaccaaggtggagatcaaacgtgcggcc

SEQ ID NO: 421 - protein, 116 aa, Artificial sequence
  Variable light chain of SC03-049
DIQLTQSPSSLAVSLGERATINCKSSQSVLYSSNNKNYLAWYQQKPGQPPKLLIYWASTRESGVPDRFSGSGSGTDFTLTISSLQAEDVAVYYCQQYYSTPLTFGGGTKVEIKRAA

SEQ ID NO: 422 - DNA, 357 bp, Artificial sequence
  CDS (1)..(357): Variable heavy chain of SC03-050
atggccgaagtgcagctggtgcagtctgggggaggcttggtccagcctggggggtccctgagactctcctgtgcagcctctggattcaccttcagtagttatgctatgcactgggtccgccaggctccagggaagggactggaatatgtttcaggtattagtagtaatgggggtagcacatattatgcaaactctgtgaagggcagattcaccatctccagagacaattccaagaacacgctgtatcttcaaatgggcagcctgagagctgaggacatggctgtgtattactgtgcgagaactactaatcgggcttttgatatctggggccaagggacaatggtcaccgtctcgagc

SEQ ID NO: 423 - protein, 119 aa, Artificial sequence; identical to SEQ ID NO: 339
  Variable heavy chain of SC03-050

SEQ ID NO: 424 - DNA, 348 bp, Artificial sequence
  CDS (1)..(348): Variable light chain of SC03-050
gacatccagatgacccagtctccagactccctggctgtgtctctgggcgagagggccaccatcaactgcaagtccagccagagtgttttatacagctccaacaataagaactacttagcttggtaccagcagaaaccaggacagcctcctaagctgctcatttactgggcatctacccgggaatccggggtccctgaccgattcagtggcagcgggtctgggacagatttcactctcaccatcagcagcctgcaggctgaagatgtggcagtttattactgtcagcaatattatagtactccgctcactttcggcggagggaccaaggtggaaatcaaacgtgcggcc

SEQ ID NO: 425 - protein, 116 aa, Artificial sequence
  Variable light chain of SC03-050
DIQMTQSPDSLAVSLGERATINCKSSQSVLYSSNNKNYLAWYQQKPGQPPKLLIYWASTRESGVPDRFSGSGSGTDFTLTISSLQAEDVAVYYCQQYYSTPLTFGGGTKVEIKRAA

SEQ ID NO: 426 - DNA, 363 bp, Artificial sequence
  CDS (1)..(363): Variable heavy chain of SC03-051
atggcccaggtgcagctggtgcagtctggaacagaggtgaaaaagccgggggagtctctgaagatctcctgtaagggttctggatacggctttatcacctactggatcggctgggtgcgccagatgcccgggaaaggcctggagtggatggggatcatctatcctggtgactctgaaaccagatacagcccgtccttccaaggccaggtcaccatctcagccgacaagtccatcaacaccgcctacctgcagtggagcagcctgaaggcctcggacaccgccatatattactgtgcggggggttcggggatttctacccctatggacgtctggggccaagggaccacggtcaccgtctcgagc

SEQ ID NO: 427 - protein, 121 aa, Artificial sequence; identical to SEQ ID NO: 311
  Variable heavy chain of SC03-051

SEQ ID NO: 428 - DNA, 348 bp, Artificial sequence
  CDS (1)..(348): Variable light chain of SC03-051
gacatccagatgacccagtctccagactccctggctgtgtctctgggcgagagggccaccatcaactgcaagtccggccagagtattttatacagctccaacgataagaactacttagcttggtaccagcagaaaccaggacagcctcctaagcttctcatttactgggcatctacccgggaatccggggtccctgaccgattcagtggcagcgggtctgggacagatttcactctcaccatcagcagcctgcaggctgaagatgtggcagtttattactgtcagcaatattatagtactccgtacacttttggccaggggaccaaggtggaaatcaaacgtgcggcc

SEQ ID NO: 429 - protein, 116 aa, Artificial sequence
  Variable light chain of SC03-051
DIQMTQSPDSLAVSLGERATINCKSGQSILYSSNDKNYLAWYQQKPGQPPKLLIYWASTRESGVPDRFSGSGSGTDFTLTISSLQAEDVAVYYCQQYYSTPYTFGQGTKVEIKRAA

SEQ ID NO: 430 - DNA, 363 bp, Artificial sequence
  CDS (1)..(363): Variable heavy chain of SC03-052
atggccgaagtgcagctggtgcagtctggaacagaggtgaaaaagccgggggagtctctgaaggtctcctgtaagggttctggatacggctttatcacctactggatcggctgggtgcgccagatgcccgggaaaggcctggagtggatggggatcatctatcctggtgactctgaaaccagatacagcccgtccttccaaggccaggtcaccatctcagccgacaagtccatcaacaccacctacctgcagtggagcagcctgaaggcctcggacaccgccatatattactgtgcggggggttcggggatttctacccctatggacgtctggggccaagggaccacggtcaccgtctcgagc

SEQ ID NO: 431 - protein, 121 aa, Artificial sequence
  Variable heavy chain of SC03-052
MAEVQLVQSGTEVKKPGESLKVSCKGSGYGFITYWIGWVRQMPGKGLEWMGIIYPGDSETRYSPSFQGQVTISADKSINTTYLQWSSLKASDTAIYYCAGGSGISTPMDVWGQGTTVTVSS

SEQ ID NO: 432 - DNA, 348 bp, Artificial sequence
  CDS (1)..(348): Variable light chain of SC03-052
gacatccagatgacccagtctccagactccctggctgtgtctctgggcgagagggccaccatcaactgcaagtccagccagagtgttttatacagctccaacaataagaactacttagcttggtaccagcagaaaccaggacagcctcctaagctgctcatttactgggcatctacccgggaatccggggtccctgaccgattcagtggcagcgggtctgggacagatttcactctcaccatcagcagcctgcaggctgaagatgtggcagtttattactgtcagcaatattatagtactccgtacacttttggccaggggaccaaggtggaaatcaaacgtgcggcc

SEQ ID NO: 433 - protein, 116 aa, Artificial sequence
  Variable light chain of SC03-052
DIQMTQSPDSLAVSLGERATINCKSSQSVLYSSNNKNYLAWYQQKPGQPPKLLIYWASTRESGVPDRFSGSGSGTDFTLTISSLQAEDVAVYYCQQYYSTPYTFGQGTKVEIKRAA

SEQ ID NO: 434 - DNA, 372 bp, Artificial sequence
  CDS (1)..(372): Variable heavy chain of SC03-053
atggcccaggtgcagctggtgcagtctggggctgaggtgaagaagcctggggcctcagtgatggtttcctgcaaggcctctggatacaccttcagtaactatgctatgcattgggtgcgccagggccccggacaaaggcttgagtggatgggatggatcaacgctgacaaaggtcagacaaaatattcacagaagttccagggcagagtcaccattaccggggacacatccgccagcacagcctacatggacctgagcagcctgagatctgaagacacggctgtgtattactgtgcgagagggaccggatatttgcggagctaccacggcatggacgtctggggccaggggaccacggtcaccgtctcgagc

SEQ ID NO: 435 - protein, 124 aa, Artificial sequence
  Variable heavy chain of SC03-053
MAQVQLVQSGAEVKKPGASVMVSCKASGYTFSNYAMHWVRQGPGQRLEWMGWINADKGQTKYSQKFQGRVTITGDTSASTAYMDLSSLRSEDTAVYYCARGTGYLRSYHGMDVWGQGTTVTVSS

SEQ ID NO: 436 - DNA, 345 bp, Artificial sequence
  CDS (1)..(345): Variable light chain of SC03-053
gatgttgtgatgactcagtctccaccctccctgcccgtcacccctggggagccggcctccatctcctgcaggtctagtcagagcctcctccatagtaatggatacaactatttggattggtacctgcagaagccaggtcagtctccacagctcctgatctatttgggttctaatcgggcctccggggtccctgacaggttcagtggcagtggatcaggcacagattttacactgaaaatcagcagagtggaggctgaggatgttggggtttattactgcatgcaagctctacaaactcctctcaccttcggccaagggacacgactggagattaaacgtgcggcc

SEQ ID NO: 437 - protein, 115 aa, Artificial sequence
  Variable light chain of SC03-053
DVVMTQSPPSLPVTPGEPASISCRSSQSLLHSNGYNYLDWYLQKPGQSPQLLIYLGSNRASGVPDRFSGSGSGTDFTLKISRVEAEDVGVYYCMQALQTPLTFGQGTRLEIKRAA

SEQ ID NO: 438 - DNA, 357 bp, Artificial sequence
  CDS (1)..(357): Variable heavy chain of SC03-054
atggccgaagtgcagctggtgcagtctgggggaggcgtggtccagcctgggaggtccctgagactctcctgtgcagcctctggattcaccttcagtagttatgctatgcactgggtccgccaggctccagggaagggactggaatatgtttcaggtattagtagtaatgggggtagcacatattatgcaaactctgtgaagggcagattcaccatctccagagacaattccaagaacacgctgtatcttcaaatgggcagcctgagagctgaggacatggctgtgtattactgtgcgagaactactaatcgggcttttgatatctggggccaagggacaatggtcaccgtctcgagc

SEQ ID NO: 439 - protein, 119 aa, Artificial sequence
  Variable heavy chain of SC03-054
MAEVQLVQSGGGVVQPGRSLRLSCAASGFTFSSYAMHWVRQAPGKGLEYVSGISSNGGSTYYANSVKGRFTISRDNSKNTLYLQMGSLRAEDMAVYYCARTTNRAFDIWGQGTMVTVSS

SEQ ID NO: 440 - DNA, 348 bp, Artificial sequence
  CDS (1)..(348): Variable light chain of SC03-054
gacatccagttgacccagtctccagactccctggctgtgtctctgggcgagagggccaccatcaactgcaagtccagccagagtgttttatacagctccaacaataagaactacttagcttggtaccagcagaaaccaggacagcctcctaagctgctcatttactgggcatctacccgggaatccggggtccctgaccgattcagtggcggcgggtctgggacagatttcactctcaccatcagcagcctgcaggctgaagatgtggcagtttattactgtcagcaatattatagtactccgtacagttttggccaggggaccaaggtggagatcaaacgtgcggcc

SEQ ID NO: 441 - protein, 116 aa, Artificial sequence
  Variable light chain of SC03-054
DIQLTQSPDSLAVSLGERATINCKSSQSVLYSSNNKNYLAWYQQKPGQPPKLLIYWASTRESGVPDRFSGGGSGTDFTLTISSLQAEDVAVYYCQQYYSTPYSFGQGTKVEIKRAA

SEQ ID NO: 442 - DNA, 390 bp, Artificial sequence
  CDS (1)..(390): Variable heavy chain of SC03-055
atggcccaggtgcagctacagcagtggggcgcaggactgttgaagccttcggagaccctgtccctcacctgcgctgtctatggtgggtccttcagtggtttctactggagctggatccgccagcccccagggaaggggctggagtggattggggaaatcaatcatagtggaagcaccaactacaacccgtccctcaagagtcgagtcaccatatcagcagacacgtccaagaaccagttctccctgaagctgagctctgtgaccgccgcggacacggctgtgtattactgtgcgagaagggtggaggtagtagagtaccagctgctccgtccccgatataaaagttggttcgacccctggggccagggaaccctggtcaccgtctcgagc

SEQ ID NO: 443 - protein, 130 aa, Artificial sequence
  Variable heavy chain of SC03-055
MAQVQLQQWGAGLLKPSETLSLTCAVYGGSFSGFYWSWIRQPPGKGLEWIGEINHSGSTNYNPSLKSRVTISADTSKNQFSLKLSSVTAADTAVYYCARRVEVVEYQLLRPRYKSWFDPWGQGTLVTVSS

SEQ ID NO: 444 - DNA, 339 bp, Artificial sequence
  CDS (1)..(339): Variable light chain of SC03-055
cagtctgtgttgacgcagccgccctcagtgtctggggccccagggcagagggtctccatctcctgctctggaagcggcgccaatggtgggactgatcctgtttcttggtaccagaaattcccaggaacagccccccacctcctcatttatgacaataataagcgaccctcagggattcctgaccgattctctggctccaagtctggcgcgtcagccaccctggacatcaccggactccagactggggacgaggccgactattactgcggagcatgggatcccagtctgagcggttatgtcttcgggactgggacccagctcaccgttttaagtgcggcc

SEQ ID NO: 445 - protein, 113 aa, Artificial sequence
  Variable light chain of SC03-055
QSVLTQPPSVSGAPGQRVSISCSGSGANGGTDPVSWYQKFPGTAPHLLIYDNNKRPSGIPDRFSGSKSGASATLDITGLQTGDEADYYCGAWDPSLSGYVFGTGTQLTVLSAA

SEQ ID NO: 446 - DNA, 363 bp, Artificial sequence
  CDS (1)..(363): Variable heavy chain of SC03-056
atggccgaagtgcagctggtgcagtctggaacagaggtgaaaaagccgggggagtctctgaagatctcctgtaagggttctggatacggctttatcacctactggatcggctgggtgcgccagatgcccgggaaaggcctggagtggatggggatcatctatcctggtgactctgaaaccagatacagcccgtccttccaaggccaggtcaccatctcagccgacaagtccatcaacaccgcctacctgcagtggagcagcctgaaggcctcggacaccgccatatattactgtgcggggggttcggggatttctacccctatggacgtctggggccaagggaccacggtcaccgtctcgagc

SEQ ID NO: 447 - protein, 121 aa, Artificial sequence; identical to SEQ ID NO: 367
  Variable heavy chain of SC03-056

SEQ ID NO: 448 - DNA, 348 bp, Artificial sequence
  CDS (1)..(348): Variable light chain of SC03-056
gatgttgtgatgactcagtctccagactccctggctgtgtctctgggcgagagggccaccatcaactgcaagtccagccagagtgttttatacagctccaacaataagaactacttagcttggtaccagcagaaaccaggacagcctcctaagctgctcatttactgggcatctacccgggaatccggggtccctgaccgattcagtggcagcgggtctgggacagatttcactctcaccatcagcagcctgcaggctgaagatgtggcagtttattactgtcagcaatattatagtactccgtacagttttggccaggggaccaaggtggagatcaaacgtgcggcc

SEQ ID NO: 449 - protein, 116 aa, Artificial sequence
  Variable light chain of SC03-056
DVVMTQSPDSLAVSLGERATINCKSSQSVLYSSNNKNYLAWYQQKPGQPPKLLIYWASTRESGVPDRFSGSGSGTDFTLTISSLQAEDVAVYYCQQYYSTPYSFGQGTKVEIKRAA

SEQ ID NO: 450 - DNA, 387 bp, Artificial sequence
  CDS (1)..(387): Variable heavy chain of SC03-057
atggcccaggtgcagctggtgcagtctggggctgaggtgaagaagcctgggtcctcggtgaaggtctcctgcaaggcttctggaggcaccttcagcagatatgctatcagttgggtgcgacaggcccctggacaaggccttgagtggatgggaaggatcaaccctatccttaatttaacaaactacgcacagaagttccagggcagagtcacgattaccgcggacaaatccacgagtacagcctacatggagatgagtagcctgagatctgaggacacggccatttattactgtgcgagcccggatatagtagtagccggtcacgcttcccccccacactacactatggacgtctggggccaagggaccacggtcaccgtctcgagc

SEQ ID NO: 451 - protein, 129 aa, Artificial sequence
  Variable heavy chain of SC03-057
MAQVQLVQSGAEVKKPGSSVKVSCKASGGTFSRYAISWVRQAPGQGLEWMGRINPILNLTNYAQKFQGRVTITADKSTSTAYMEMSSLRSEDTAIYYCASPDIVVAGHASPPHYTMDVWGQGTTVTVSS

SEQ ID NO: 452 - DNA, 330 bp, Artificial sequence
  CDS (1)..(330): Variable light chain of SC03-057
gacatccagatgacccagtctccatcctcactgtctgcatctgtaggagacagagtcaccatcacttgccgggcaagtcagggcattagaaatgatttaggctggtatcagcagaaaccagggaaagcccctaacctcctgatctatcaggcatctgctttacagagtggggtcccatcaaggttcagcggcagtgaatctggggcagaattcactctcaccatcagcagcctgcaccctgatgattttgcaacttattactgccaacagtatcatgattttccgatcaccttcggccaagggacacgactggagattaaacgtgcggcc

SEQ ID NO: 453 - protein, 110 aa, Artificial sequence
  Variable light chain of SC03-057
DIQMTQSPSSLSASVGDRVTITCRASQGIRNDLGWYQQKPGKAPNLLIYQASALQSGVPSRFSGSESGAEFTLTISSLHPDDFATYYCQQYHDFPITFGQGTRLEIKRAA

SEQ ID NO: 454 - DNA, 357 bp, Artificial sequence
  CDS (1)..(357): Variable heavy chain of SC03-058
atggccgaggtccagctggtacagtctggaggaggcttggtccagcctggggggtccctcaaactctcctgtgcagcctctggattcaccttcagtagttatgctatgcactgggtccgccaggctccagggaagggactggaatatgtttcaggtattagtagtaatgggggtagcacatattatgcaaactctgtgaagggcagattcaccatctccagagacaattccaagaacacgctgtatcttcaaatgggcagcctgagagctgaggacatggctgtgtattactgtgcgagaactactaatcgggcttttgatatctggggccaagggacaatggtcaccgtctcgagc

SEQ ID NO: 455 - protein, 119 aa, Artificial sequence
  Variable heavy chain of SC03-058
MAEVQLVQSGGGLVQPGGSLKLSCAASGFTFSSYAMHWVRQAPGKGLEYVSGISSNGGSTYYANSVKGRFTISRDNSKNTLYLQMGSLRAEDMAVYYCARTTNRAFDIWGQGTMVTVSS

SEQ ID NO: 456 - DNA, 348 bp, Artificial sequence; identical to SEQ ID NO: 344
  CDS (1)..(348): Variable heavy chain of SC03-058

SEQ ID NO: 457 - protein, 116 aa, Artificial sequence; identical to SEQ ID NO: 345
  Variable heavy chain of SC03-058

SEQ ID NO: 458 - DNA, 375 bp, Artificial sequence
  CDS (1)..(375): Variable heavy chain of SC03-059
atggcccaggtgcagctggtgcaatctggggctgaggtgaagaagcctgggtcctcggtgaaggtctcctgcagggcttctggtggaggcgtcttccgcaattatgctatcaactgggtgcgacaggcccctggacaagggcttgagtggatgggaatgatcaaccctagtggtggtagcacaagctacgcacagaagttccagggcagagtcaccctgaccagggacacgtccacgagcacagtctacatggagctgagcagcctgagatctgaggacacggccgtgtattactgtgcgagattccctggtggtaccagaagccgcggctacatggacgtctggggcaaagggaccacggtcaccgtctcgagc

SEQ ID NO: 459 - protein, 125 aa, Artificial sequence
  Variable heavy chain of SC03-059
MAQVQLVQSGAEVKKPGSSVKVSCRASGGGVFRNYAINWVRQAPGQGLEWMGMINPSGGSTSYAQKFQGRVTLTRDTSTSTVYMELSSLRSEDTAVYYCARFPGGTRSRGYMDVWGKGTTVTVSS

SEQ ID NO: 460 - DNA, 330 bp, Artificial sequence; identical to SEQ ID NO: 304
  CDS (1)..(330): Variable light chain of SC03-059

SEQ ID NO: 461 - protein, 110 aa, Artificial sequence; identical to SEQ ID NO: 305
  Variable light chain of SC03-059

SEQ ID NO: 462 - DNA, 3789 bp, Artificial sequence
  CDS (10)..(3777): Codon-optimized sequence of S protein of SARS-CoV stra in Frankfurt 1
ggtaccgccatgttcatcttcctgctgttcctgaccctgaccagcggcagcgatctggataggtgcaccaccttcgacgacgtgcaggcccctaattacacccagcacaccagctctatgcggggcgtgtactaccccgacgagatcttcagaagcgacaccctgtacctgacacaggacctgttcctgcccttctacagcaacgtgaccggcttccacaccatcaaccacaccttcggcaaccccgtgatccctttcaaggacggcatctacttcgccgccaccgagaagagcaatgtggtgcggggctgggtgttcggcagcaccatgaacaacaagagccagagcgtgatcatcatcaacaatagcaccaacgtggtgatcagggcctgcaacttcgagctgtgcgacaaccctttcttcgccgtgtccaaacctatgggcacccagacccacaccatgatcttcgacaacgccttcaactgcaccttcgagtacatcagcgacgccttcagcctggatgtgagcgagaagagcgggaacttcaagcacctgcgggagttcgtgttcaagaacaaggacggcttcctgtacgtgtacaagggctaccagcccatcgacgtggtgagagatctgcccagcggcttcaacaccctgaagcccatcttcaagctgcccctgggcatcaacatcaccaacttccgggccatcctgaccgccttcagccctgcccaggacatctggggcaccagcgccgctgcctacttcgtgggctacctgaagcccaccaccttcatgctgaagtacgacgagaacggcaccatcaccgatgccgtggactgcagccagaaccccctggccgagctgaagtgcagcgtgaagagcttcgagatcgacaagggcatctaccagaccagcaacttcagagtggtgcccagcggcgatgtggtgaggttccccaacatcaccaacctgtgccctttcggcgaggtgttcaacgccaccaagttccctagcgtgtacgcctgggagcggaagaagatcagcaactgcgtggccgattacagcgtgctgtacaacagcaccttcttcagcaccttcaagtgctacggcgtgagcgccaccaagctgaacgacctgtgcttcagcaacgtgtacgccgacagcttcgtggtgaagggcgacgacgtgagacagatcgcccctggccagaccggcgtgatcgccgactacaattacaagctgcccgacgacttcatgggctgcgtgctggcctggaacaccagaaacatcgacgccacctccaccggcaactacaactacaagtaccgctacctgaggcacggcaagctgagacccttcgagcgggacatcagcaacgtgcccttcagccctgacggcaagccctgcaccccccctgccctgaactgctactggcccctgaacgactacggcttctacaccaccaccggcatcggctaccagccttacagagtggtggtgctgagcttcgagctgctgaacgcccctgccaccgtgtgcggccccaagctgagcaccgacctgatcaagaaccagtgcgtgaacttcaacttcaacggcctgaccggcaccggcgtgctgacccctagcagcaagaggttccagcccttccagcagttcggcagggacgtgagcgatttcaccgacagcgtgagggatcctaagaccagcgagatcctggacatcagcccttgcagcttcggcggcgtgagcgtgatcacccccggcaccaacgccagctccgaggtggccgtgctgtaccaggacgtgaactgcaccgacgtgagcaccgccatccacgccgaccagctgacccccgcctggagaatctacagcaccggcaacaacgtgttccagacccaggccggctgcctgatcggcgccgagcacgtggacaccagctacgagtgcgacatccccatcggagccggcatctgcgccagctaccacaccgtgagcctgctgagaagcaccagccagaagagcatcgtggcctacaccatgagcctgggcgccgacagcagcatcgcctacagcaacaacaccatcgccatccccaccaacttcagcatcagcatcaccaccgaggtgatgcccgtgagcatggccaagaccagcgtggactgcaacatgtacatctgcggcgacagcaccgagtgcgccaacctgctgctgcagtacggcagcttctgcacccagctgaacagagccctgagcggcatcgccgccgagcaggacagaaacaccagggaggtgttcgcccaggtgaagcagatgtataagacccccaccctgaagtacttcggcggcttcaacttcagccagatcctgcccgatcctctgaagcccaccaagcggagcttcatcgaggacctgctgttcaacaaggtgaccctggccgacgccggctttatgaagcagtacggcgagtgcctgggcgatatcaacgccagggacctgatctgcgcccagaagttcaatggcctgaccgtgctgccccccctgctgaccgacgacatgatcgccgcctacacagccgccctggtgagcggcaccgccaccgccggctggacctttggcgccggagccgccctgcagatccccttcgccatgcagatggcctaccggttcaatggcatcggcgtgacccagaacgtgctgtacgagaaccagaagcagatcgccaaccagttcaacaaggccatcagccagatccaggagagcctgaccaccacaagcaccgccctgggcaagctgcaggacgtggtgaaccagaacgcccaggccctgaataccctggtgaagcagctgagcagcaacttcggcgccatcagctccgtgctgaacgacatcctgagccggctggacaaggtggaggccgaggtgcagatcgacagactgatcaccggcagactgcagagcctgcagacctacgtgacccagcagctgatcagagccgccgagatcagagccagcgccaacctggccgccaccaagatgagcgagtgcgtgctgggccagagcaagagagtggacttctgcggcaagggctaccacctgatgagcttcccccaggccgctccccacggcgtggtgttcctgcacgtgacctacgtgcctagccaggagaggaatttcaccaccgcccctgccatctgccacgagggcaaggcctacttccccagagagggcgtgttcgtgttcaatggcaccagctggttcatcacccagcggaacttcttcagcccccagatcatcacaaccgacaacaccttcgtgagcggcaactgcgacgtggtgatcggcatcattaacaataccgtgtacgaccccctgcagcccgagctggatagcttcaaggaggagctggacaagtacttcaagaaccacaccagccccgatgtggacttcggcgacatcagcggcatcaatgccagcgtggtgaacatccagaaggagatcgaccggctgaacgaggtggccaagaacctgaacgagagcctgatcgacctgcaggagctgggcaagtacgagcagtacatcaagtggccctggtacgtgtggctgggcttcatcgccggcctgatcgccatcgtgatggtgaccatcctgctgtgctgcatgaccagctgctgctcctgcctgaagggcgcctgcagctgtggcagctgctgcaagttcgacgaggacgatagcgagcccgtgctgaagggcgtgaagctgcactacacctgatgaattctcgag

SEQ ID NO: 463 - protein, 1255 aa, Artificial sequence
  Codon-optimized sequence of S protein of SARS-CoV stra in Frankfurt 1
MFIFLLFLTLTSGSDLDRCTTFDDVQAPNYTQHTSSMRGVYYPDEIFRSDTLYLTQDLFLPFYSNVTGFHTINHTFGNPVIPFKDGIYFAATEKSNVVRGWVFGSTMNNKSQSVIIINNSTNVVIRACNFELCDNPFFAVSKPMGTQTHTMIFDNAFNCTFEYISDAFSLDVSEKSGNFKHLREFVFKNKDGFLYVYKGYQPIDVVRDLPSGFNTLKPIFKLPLGINITNFRAILTAFSPAQDIWGTSAAAYFVGYLKPTTFMLKYDENGTITDAVDCSQNPLAELKCSVKSFEIDKGIYQTSNFRVVPSGDVVRFPNITNLCPFGEVFNATKFPSVYAWERKKISNCVADYSVLYNSTFFSTFKCYGVSATKLNDLCFSNVYADSFVVKGDDVRQIAPGQTGVIADYNYKLPDDFMGCVLAWNTRNIDATSTGNYNYKYRYLRHGKLRPFERDISNVPFSPDGKPCTPPALNCYWPLNDYGFYTTTGIGYQPYRVVVLSFELLNAPATVCGPKLSTDLIKNQCVNFNFNGLTGTGVLTPSSKRFQPFQQFGRDVSDFTDSVRDPKTSEILDISPCSFGGVSVITPGTNASSEVAVLYQDVNCTDVSTAIHADQLTPAWRIYSTGNNVFQTQAGCLIGAEHVDTSYECDIPIGAGICASYHTVSLLRSTSQKSIVAYTMSLGADSSIAYSNNTIAIPTNFSISITTEVMPVSMAKTSVDCNMYICGDSTECANLLLQYGSFCTQLNRALSGIAAEQDRNTREVFAQVKQMYKTPTLKYFGGFNFSQILPDPLKPTKRSFIEDLLFNKVTLADAGFMKQYGECLGDINARDLICAQKFNGLTVLPPLLTDDMIAAYTAALVSGTATAGWTFGAGAALQIPFAMQMAYRFNGIGVTQNVLYENQKQIANQFNKAISQIQESLTTTSTALGKLQDVVNQNAQALNTLVKQLSSNFGAISSVLNDILSRLDKVEAEVQIDRLITGRLQSLQTYVTQQLIRAAEIRASANLAATKMSECVLGQSKRVDFCGKGYHLMSFPQAAPHGVVFLHVTYVPSQERNFTTAPAICHEGKAYFPREGVFVFNGTSWFITQRNFFSPQIITTDNTFVSGNCDVVIGIINNTVYDPLQPELDSFKEELDKYFKNHTSPDVDFGDISGINASVVNIQKEIDRLNEVAKNLNESLIDLQELGKYEQYIKWPWYVWLGFIAGLIAIVMVTILLCCMTSCCSCLKGACSCGSCCKFDEDDSEPVLKGVKLHYT

SEQ ID NO: 464 - DNA, 29 bp, Artificial sequence
  Primer XhoISpikeRevCOG
gttcctcgaggggccacttgatgtactgc

SEQ ID NO: 465 - DNA, 18 bp, Artificial sequence
  Primer SpikeCOG seq 1
ccaggtgaagcagatgta

SEQ ID NO: 466 - DNA, 32 bp, Artificial sequence
  Primer KpnINCFor
cttggtaccgccaccatgtctgataatggacc

SEQ ID NO: 467 - DNA, 28 bp, Artificial sequence
  Primer XbaINCRev
gttctctagatgcctgagttgaatcagc

SEQ ID NO: 468 - protein, 9 aa, Artificial sequence
  Peptide
RSAPRITFG

SEQ ID NO: 469 - DNA, 32 bp, Artificial sequence
  oligonucleotide primer EcoRIspikeFor318
cctggaattctccatggccaacatcaccaacc

SEQ ID NO: 470 - DNA, 27 bp, Artificial sequence
  Oligonucleotide primer XbaIspikeRev510
gaagggccctctagacacggtggcagg

SEQ ID NO: 471 - DNA, 1350 bp, Artificial sequence
  CDS (1)..(1350): IgG heavy chain of 03-006
gaggtgcagctggtggagtctgggggaggcttggtacagcctggggggtccctgagactctcctgtgcagcctctggattcaccttcagcggctaccctatgcactgggtccgccaggcgcccgggaaggggctggagtgggtggcagttatatcatatgacggaagtaataaatactatgcagactccgtgaagggccgattcaccatctccagagacaattccaagaacacgctgtatctgcaaatgaacagcctgagagctgaggacacagctgtgtattactgtgctaaagacggcagcccccgcacccccagcttcgattactggggccagggcaccctggtgaccgtctccagcgctagcaccaagggccccagcgtgttccccctggcccccagcagcaagagcaccagcggcggcacagccgccctgggctgcctggtgaaggactacttccccgagcccgtgaccgtgagctggaacagcggcgccttgaccagcggcgtgcacaccttccccgccgtgctgcagagcagcggcctgtacagcctgagcagcgtggtgaccgtgcccagcagcagcctgggcacccagacctacatctgcaacgtgaaccacaagcccagcaacaccaaggtggacaaacgcgtggagcccaagagctgcgacaagacccacacctgccccccctgccctgcccccgagctgctgggcggaccctccgtgttcctgttcccccccaagcccaaggacaccctcatgatcagccggacccccgaggtgacctgcgtggtggtggacgtgagccacgaggaccccgaggtgaagttcaactggtacgtggacggcgtggaggtgcacaacgccaagaccaagccccgggaggagcagtacaacagcacctaccgggtggtgagcgtgctcaccgtgctgcaccaggactggctgaacggcaaggagtacaagtgcaaggtgagcaacaaggccctgcctgcccccatcgagaagaccatcagcaaggccaagggccagccccgggagccccaggtgtacaccctgccccccagccgggaggagatgaccaagaaccaggtgtccctcacctgtctggtgaagggcttctaccccagcgacatcgccgtggagtgggagagcaacggccagcccgagaacaactacaagaccaccccccctgtgctggacagcgacggcagcttcttcctgtacagcaagctcaccgtggacaagagccggtggcagcagggcaacgtgttcagctgcagcgtgatgcacgaggccctgcacaaccactacacccagaagagcctgagcctgagccccggcaag

SEQ ID NO: 472 - protein, 450 aa, Artificial sequence
  IgG heavy chain of 03-006
EVQLVESGGGLVQPGGSLRLSCAASGFTFSGYPMHWVRQAPGKGLEWVAVISYDGSNKYYADSVKGRFTISRDNSKNTLYLQMNSLRAEDTAVYYCAKDGSPRTPSFDYWGQGTLVTVSSASTKGPSVFPLAPSSKSTSGGTAALGCLVKDYFPEPVTVSWNSGALTSGVHTFPAVLQSSGLYSLSSVVTVPSSSLGTQTYICNVNHKPSNTKVDKRVEPKSCDKTHTCPPCPAPELLGGPSVFLFPPKPKDTLMISRTPEVTCVVVDVSHEDPEVKFNWYVDGVEVHNAKTKPREEQYNSTYRVVSVLTVLHQDWLNGKEYKCKVSNKALPAPIEKTISKAKGQPREPQVYTLPPSREEMTKNQVSLTCLVKGFYPSDIAVEWESNGQPENNYKTTPPVLDSDGSFFLYSKLTVDKSRWQQGNVFSCSVMHEALHNHYTQKSLSLSPGK

SEQ ID NO: 473 - DNA, 1335 bp, Artificial sequence
  CDS (1)..(1335): IgG heavy chain of 03-015
gaggtgcagctggtggagtctgggggaggtgtggtacggcctggggggtccctgagactctcctgtgcagcctctggattcacctttgatgattatggcatgagctgggtccgccaagctccagggaaggggctggagtgggtctctggtattaattggaatggtggtagcacaggttatgcagactctgtgaagggccgattcaccatctccagagacaacgccaagaactccctgtatctgcaaatgaacagtctgagagccgaggacacggccgtgtattactgtgcaagaggtttgtctcttcgtccttggggccagggcaccctggtgaccgtctccagcgctagcaccaagggccccagcgtgttccccctggcccccagcagcaagagcaccagcggcggcacagccgccctgggctgcctggtgaaggactacttccccgagcccgtgaccgtgagctggaacagcggcgccttgaccagcggcgtgcacaccttccccgccgtgctgcagagcagcggcctgtacagcctgagcagcgtggtgaccgtgcccagcagcagcctgggcacccagacctacatctgcaacgtgaaccacaagcccagcaacaccaaggtggacaaacgcgtggagcccaagagctgcgacaagacccacacctgccccccctgccctgcccccgagctgctgggcggaccctccgtgttcctgttcccccccaagcccaaggacaccctcatgatcagccggacccccgaggtgacctgcgtggtggtggacgtgagccacgaggaccccgaggtgaagttcaactggtacgtggacggcgtggaggtgcacaacgccaagaccaagccccgggaggagcagtacaacagcacctaccgggtggtgagcgtgctcaccgtgctgcaccaggactggctgaacggcaaggagtacaagtgcaaggtgagcaacaaggccctgcctgcccccatcgagaagaccatcagcaaggccaagggccagccccgggagccccaggtgtacaccctgccccccagccgggaggagatgaccaagaaccaggtgtccctcacctgtctggtgaagggcttctaccccagcgacatcgccgtggagtgggagagcaacggccagcccgagaacaactacaagaccaccccccctgtgctggacagcgacggcagcttcttcctgtacagcaagctcaccgtggacaagagccggtggcagcagggcaacgtgttcagctgcagcgtgatgcacgaggccctgcacaaccactacacccagaagagcctgagcctgagccccggcaag

SEQ ID NO: 474 - protein, 445 aa, Artificial sequence
  IgG heavy chain of 03-015
EVQLVESGGGVVRPGGSLRLSCAASGFTFDDYGMSWVRQAPGKGLEWVSGINWNGGSTGYADSVKGRFTISRDNAKNSLYLQMNSLRAEDTAVYYCARGLSLRPWGQGTLVTVSSASTKGPSVFPLAPSSKSTSGGTAALGCLVKDYFPEPVTVSWNSGALTSGVHTFPAVLQSSGLYSLSSVVTVPSSSLGTQTYICNVNHKPSNTKVDKRVEPKSCDKTHTCPPCPAPELLGGPSVFLFPPKPKDTLMISRTPEVTCVVVDVSHEDPEVKFNWYVDGVEVHNAKTKPREEQYNSTYRVVSVLTVLHQDWLNGKEYKCKVSNKALPAPIEKTISKAKGQPREPQVYTLPPSREEMTKNQVSLTCLVKGFYPSDIAVEWESNGQPENNYKTTPPVLDSDGSFFLYSKLTVDKSRWQQGNVFSCSVMHEALHNHYTQKSLSLSPGK

SEQ ID NO: 475 - DNA, 642 bp, Artificial sequence
  CDS (1)..(642): IgG light chain of 03-006
gacatccagatgacccagtctccacactctctgtctgcatctgtaggagacagagtcaccatcacttgccgggcgagtcagggcattagcaattatttagcctggtatcagcagaaaccagggaaagttcctaagctcctgatctatgctgcatccactttgcaatcaggggtcccatctcggttcagtggcagtggatctgggacagatttcactctcaccatcagcagcctgcagcctgaagatgttggggtttattactgccagcagaggttccgcacgccggtcaccttcggccagggcaccaaactggaaatcaaacggaccgtggccgctcccagcgtgttcatcttccccccctccgacgagcagctgaagagcggcaccgccagcgtggtgtgcctgctgaacaacttctacccccgggaggccaaggtgcagtggaaggtggacaacgccctgcagagcggcaacagccaggagagcgtgaccgagcaggacagcaaggactccacctacagcctgagcagcaccctcaccctgagcaaggccgactacgagaagcacaaggtgtacgcctgcgaggtgacccaccagggcctgagcagccccgtgaccaagagcttcaaccggggcgagtgt

SEQ ID NO: 476 - protein, 214 aa, Artificial sequence
  IgG light chain of 03-006
DIQMTQSPHSLSASVGDRVTITCRASQGISNYLAWYQQKPGKVPKLLIYAASTLQSGVPSRFSGSGSGTDFTLTISSLQPEDVGVYYCQQRFRTPVTFGQGTKLEIKRTVAAPSVFIFPPSDEQLKSGTASVVCLLNNFYPREAKVQWKVDNALQSGNSQESVTEQDSKDSTYSLSSTLTLSKADYEKHKVYACEVTHQGLSSPVTKSFNRGEC

SEQ ID NO: 477 - DNA, 642 bp, Artificial sequence
  CDS (1)..(642): IgG light chain of 03-015
tcctccgagctgacccaggaccctgctgagtctgtggccttgggacagacagtcaggatcacatgccaaggagacagcctcagaagctattatgcaagctggtaccagcagaagccaggacaggcccctgtacttgtcatctatggtaaaaacaaccggccctcagggatcccagaccgattctctggctccagctcaggaaacacagcttccttgaccatcactggggctcaggcggaagatgaggctgactattactgtaactcccgggacagcagtggtaaccatgtggtattcggcggagggaccaagcttaccgtgctgggccagcccaaggccgctcccagcgtgaccctgttccccccctcctccgaggagctgcaggccaacaaggccaccctggtgtgcctcatcagcgacttctaccctggcgccgtgaccgtggcctggaaggccgacagcagccccgtgaaggccggcgtggagaccaccacccccagcaagcagagcaacaacaagtacgccgccagcagctacctgagcctcacccccgagcagtggaagagccaccggagctacagctgccaggtgacccacgagggcagcaccgtggagaagaccgtggcccccaccgagtgcagc

SEQ ID NO: 478 - protein, 214 aa, Artificial sequence
  IgG light chain of 03-015
SSELTQDPAESVALGQTVRITCQGDSLRSYYASWYQQKPGQAPVLVIYGKNNRPSGIPDRFSGSSSGNTASLTITGAQAEDEADYYCNSRDSSGNHVVFGGGTKLTVLGQPKAAPSVTLFPPSSEELQANKATLVCLISDFYPGAVTVAWKADSSPVKAGVETTTPSKQSNNKYAASSYLSLTPEQWKSHRSYSCQVTHEGSTVEKTVAPTECS

1. An isolated binding molecule able to specifically bind to a Severe Acute Respiratory Syndrome Coronavirus (SARS-Co-V) and having SARS-CoV neutralizing activity.

2. The isolated binding molecule of claim 1, wherein said binding molecule is a human binding molecule.

3. The isolated binding molecule of claim 1, wherein the binding molecule comprises at least a CDR3 region comprising an amino acid sequence selected from the group consisting of SEQ ID NO:5, SEQ ID NO:11, SEQ ID NO:12, and SEQ ID NO:292.

4. The isolated binding molecule of claim 1, wherein the binding molecule comprises a heavy chain comprising an amino acid sequence selected from the group consisting of SEQ ID NO:23, SEQ ID NO:35, SEQ ID NO:37, SEQ ID NO:315 and SEQ ID NO:447.

5. A functional variant of the isolated binding molecule of claim 3, wherein the functional variant is able to specifically bind to a SARS-CoV and has SARS-CoV neutralizing activity.

6. An isolated binding molecule able to specifically bind to amino acid residues 11-19 of the N protein of Severe Acute Respiratory Syndrome Coronavirus (SARS-Co-V).

7. The isolated binding molecule of claim 6, wherein the binding molecule comprises at least a CDR3 region comprising the amino acid sequence of SEQ ID NO:78.

8. The isolated binding molecule of claim 6, wherein the binding molecule comprises a heavy chain comprising the amino acid sequence of SEQ ID NO:86.

9. An immunoconjugate comprising an isolated binding molecule able to specifically bind to a Severe Acute Respiratory Syndrome Coronavirus (SARS-Co-V) and having SARS-CoV neutralizing activity, wherein said immunoconjugate further comprises at least one tag.

10. The immunoconjugate of claim 9, wherein the tag is selected from the group consisting of a radioactive substance, an enzyme and combinations thereof.

11. An isolated nucleic acid molecule encoding the isolated binding molecule of claim 9.

12. A vector comprising at least one isolated nucleic acid molecule of claim 11.

13. A host comprising at least one vector of claim 12.

14. The host of claim 13, wherein the host is a cell derived from a human cell.

15. A method of producing a binding molecule able to specifically bind Severe Acute Respiratory Syndrome Coronavirus (SARS-Co-V), wherein the method comprises the steps of:
a) culturing the host of claim 13 or under conditions conducive to the expression of the binding molecule and
b) recovering the expressed binding molecule.

16. A binding molecule produced by the method of claim 15.

17. A composition comprising the binding molecule of claim 1.

18. A composition comprising a nucleic acid molecule of claim 11.

19. A pharmaceutical composition for the treatment of Severe Acute Respiratory Syndrome Coronavirus (SARS-Co-V) comprising the binding molecule of claim 1, wherein the pharmaceutical composition further comprises at least one pharmaceutically acceptable excipient.

20. The pharmaceutical composition of claim 19, further comprising at least one other therapeutic agent.

21. A medicament for the treatment of Severe Acute Respiratory Syndrome Coronavirus (SARS-Co-V) comprising the binding molecule of claim 1.

22. A diagnostic method, prophylaxis, treatment, or combination thereof for a condition resulting from a Severe Acute Respiratory Syndrome Coronavirus (SARS-Co-V) comprising the binding molecule of claim 1.

23. A kit for the diagnosis, prophylaxis, treatment, or combination thereof, of a condition resulting from a Severe Acute Respiratory Syndrome Coronavirus (SARS-Co-V) comprising the binding molecule of claim 1.

24. A method of identifying a binding molecule able to specifically bind to a Severe Acute Respiratory Syndrome Coronavirus (SARS-Co-V) or a nucleic acid molecule encoding a binding molecule specifically binding to a SARS-CoV, said method comprising the steps of:
a) contacting a phage library of binding molecules with a SARS-CoV or a fragment thereof;
b) selecting at least once for a phage binding to the SARS-CoV or the fragment thereof; and,
c) separating and recovering the phage binding to the SARS-CoV or the fragment thereof from the phage library.

25. The method of claim 24, wherein the phage library of binding molecules is prepared from RNA isolated from cells obtained from a subject that has been vaccinated or exposed to a SARS-CoV.

26. The method of claim 24, wherein the phage library of binding molecules is a scFv phage library.

27. The method of claim 25, wherein the subject is a human subject which has recovered from SARS-CoV.

28. A method of obtaining a binding molecule specifically binding to a Severe Acute Respiratory Syndrome Coronavirus (SARS-Co-V) or a nucleic acid molecule encoding a binding molecule specifically binding to a SARS-CoV, wherein the method comprises the steps of:
a) performing the method of claim 24 and
b) isolating from the recovered phage the binding molecule and/or the nucleic acid molecule encoding the binding molecule.

29. A phage library of binding molecules, wherein the library is prepared from RNA isolated from cells obtained from a subject that has been vaccinated with a Severe Acute Respiratory Syndrome Coronavirus (SARS-Co-V) or exposed to a SARS-Co-V.

30. The phage library of binding molecules of claim 29, wherein the library is a scFv phage library.

31. The phage library of binding molecules of claim 29, wherein the subject is a human subject which has recovered from SARS-CoV.

32. A method of detecting a Severe Acute Respiratory Syndrome Coronavirus (SARS-Co-V) in a sample, said method comprising the steps of:
contacting a sample with a diagnostically effective amount of the binding molecule of claim 1, and
determining whether the binding molecule specifically binds to a molecule of the sample.

33. The method of claim 32, wherein the sample is a sample taken from a human subject potentially infected with a SARS-CoV.

34. A method of screening a binding molecule or a functional variant of a binding molecule for specific binding to the same epitope of a Severe Acute Respiratory Syndrome Coronavirus (SARS-Co-V) as the epitope bound by the binding molecule of claim 1, wherein the method comprises the steps of:
a) contacting the binding molecule to be screened with the same epitope of a SARS-CoV as the epitope bound by the binding molecule and
b) measuring if the binding molecule to be screened is able to compete for specifically binding to the SARS-CoV with the binding molecule.

35. A method of identifying a binding molecule having neutralizing activity against Severe Acute Respiratory Syndrome Coronavirus (SARS-Co-V), wherein said method comprises the steps of:
a) contacting a collection of binding molecules on the surface of replicable genetic packages with SARS-CoV under conditions conducive to binding, wherein the neutralizing activity of the binding molecule inactivates the SARS-CoV;
b) separating and recovering binding molecules that bind to SARS-CoV from binding molecules that do not bind;
c) isolating at least one recovered binding molecule; and,
d) verifying if the binding molecule isolated has neutralizing activity against SARS-CoV.

36. The method of claim 35, further comprising the step of inactivating the SARS-CoV by gamma-irradiation or UV-irradiation.

37. The method of claim 35, wherein the replicable genetic package is selected from the group consisting of a phage particle, a bacterium, a yeast, a fungus, a spore of a microorganism, and a ribosome.

38. The method of claim 35, wherein the binding molecule is a human binding molecule.

39. The method of claim 35, wherein the binding molecule is a single chain Fv.

40. The method of claim 35, wherein the inactivated SARS-CoV is purified before being inactivated.

41. The method of claim 35, wherein the inactivated SARS-CoV is immobilized.

42. The binding molecule identified by the method of claim 35, wherein the binding molecule has neutralizing activity against the SARS-CoV.

43. A pharmaceutical composition comprising the binding molecule of claim 42, wherein the pharmaceutical composition further comprises at least one pharmaceutically acceptable excipient.

44. The pharmaceutical composition of claim 43, further comprising at least one other therapeutic agent.

45. A method for the diagnosis, prophylaxis, treatment, or combination thereof of a condition resulting from Severe Acute Respiratory Syndrome Coronavirus (SARS-Co-V) in a subject comprising the step of administering the pharmaceutical composition of claim 43 to the subject.

46. A functional variant of the binding molecule of claim 4, wherein the functional variant is able to specifically bind to a SARS-CoV and has SARS-CoV neutralizing activity.

47. An immunoconjugate comprising a binding molecule of the functional variant of claim 5, wherein said immunoconjugate further comprises at least one tag.

48. A nucleic acid molecule encoding the functional variant of claim 5.

49. A composition comprising the functional variant of claim 5.

50. A composition comprising the immunoconjugate of claim 9.

51. A pharmaceutical composition for the treatment of Severe Acute Respiratory Syndrome Coronavirus (SARS-Co-V) comprising the functional variant of claim 5, wherein the pharmaceutical composition further comprises at least one pharmaceutically acceptable excipient.

52. A pharmaceutical composition for the treatment of Severe Acute Respiratory Syndrome Coronavirus (SARS-Co-V) comprising the immunoconjugate of claim 9, wherein the pharmaceutical composition further comprises at least one pharmaceutically acceptable excipient.

53. A method of detecting a Severe Acute Respiratory Syndrome Coronavirus (SARS-Co-V) in a sample, said method comprising the steps of:
contacting the sample with a diagnostically effective amount of the functional variant of claim 5, and
determining whether the functional variant specifically binds to a molecule of the sample.

54. A method of detecting a Severe Acute Respiratory Syndrome Coronavirus (SARS-Co-V) in a sample, said method comprising the steps of:
contacting the sample with a diagnostically effective amount of the immunoconjugate of claim 9, and
determining whether the immunoconjugate specifically binds to a molecule of the sample.
